United States Patent Application Publication US 2026/0265736 A1 - sequence listing, part 6

SEQ ID NO: 28725 - RNA, 130 nt, synthetic construct
  source 1..130: mol_type = other RNA
aaggctgtgctgaccatcgagtctttgtactctggtaccagaagctacaaagataaggcttcatgccgaaatcaatggcctctaaaaacatggccccagcagcttcagtccctttctcgtcgatggtcag

SEQ ID NO: 28726 - RNA, 129 nt, synthetic construct
  source 1..129: mol_type = other RNA
aaggctgtgctgaccatcgagtctttgtactctggtaccagaagctacaaagataaggcttcatgccgaaatcaatggcctctaaaaacatggccccagcagcttcagtccctttctcgtcgatggtca

SEQ ID NO: 28727 - RNA, 128 nt, synthetic construct
  source 1..128: mol_type = other RNA
aaggctgtgctgaccatcgagtctttgtactctggtaccagaagctacaaagataaggcttcatgccgaaatcaatggcctctaaaaacatggccccagcagcttcagtccctttctcgtcgatggtc

SEQ ID NO: 28728 - RNA, 140 nt, synthetic construct
  source 1..140: mol_type = other RNA
aaggctgtgctgaccatcgagtctttgtactctggtaccagaagctacaaagataaggcttcatgccgaaatcatatggcctctaaaaacatggccccagcagcttcagtccctttctcgtcgatggtcagcacagcctt

SEQ ID NO: 28729 - RNA, 139 nt, synthetic construct
  source 1..139: mol_type = other RNA
aaggctgtgctgaccatcgagtctttgtactctggtaccagaagctacaaagataaggcttcatgccgaaatcatatggcctctaaaaacatggccccagcagcttcagtccctttctcgtcgatggtcagcacagcct

SEQ ID NO: 28730 - RNA, 138 nt, synthetic construct
  source 1..138: mol_type = other RNA
aaggctgtgctgaccatcgagtctttgtactctggtaccagaagctacaaagataaggcttcatgccgaaatcatatggcctctaaaaacatggccccagcagcttcagtccctttctcgtcgatggtcagcacagcc

SEQ ID NO: 28731 - RNA, 137 nt, synthetic construct
  source 1..137: mol_type = other RNA
aaggctgtgctgaccatcgagtctttgtactctggtaccagaagctacaaagataaggcttcatgccgaaatcatatggcctctaaaaacatggccccagcagcttcagtccctttctcgtcgatggtcagcacagc

SEQ ID NO: 28732 - RNA, 136 nt, synthetic construct
  source 1..136: mol_type = other RNA
aaggctgtgctgaccatcgagtctttgtactctggtaccagaagctacaaagataaggcttcatgccgaaatcatatggcctctaaaaacatggccccagcagcttcagtccctttctcgtcgatggtcagcacag

SEQ ID NO: 28733 - RNA, 135 nt, synthetic construct
  source 1..135: mol_type = other RNA
aaggctgtgctgaccatcgagtctttgtactctggtaccagaagctacaaagataaggcttcatgccgaaatcatatggcctctaaaaacatggccccagcagcttcagtccctttctcgtcgatggtcagcaca

SEQ ID NO: 28734 - RNA, 134 nt, synthetic construct
  source 1..134: mol_type = other RNA
aaggctgtgctgaccatcgagtctttgtactctggtaccagaagctacaaagataaggcttcatgccgaaatcatatggcctctaaaaacatggccccagcagcttcagtccctttctcgtcgatggtcagcac

SEQ ID NO: 28735 - RNA, 133 nt, synthetic construct
  source 1..133: mol_type = other RNA
aaggctgtgctgaccatcgagtctttgtactctggtaccagaagctacaaagataaggcttcatgccgaaatcatatggcctctaaaaacatggccccagcagcttcagtccctttctcgtcgatggtcagca

SEQ ID NO: 28736 - RNA, 132 nt, synthetic construct
  source 1..132: mol_type = other RNA
aaggctgtgctgaccatcgagtctttgtactctggtaccagaagctacaaagataaggcttcatgccgaaatcatatggcctctaaaaacatggccccagcagcttcagtccctttctcgtcgatggtcagc

SEQ ID NO: 28737 - RNA, 131 nt, synthetic construct
  source 1..131: mol_type = other RNA
aaggctgtgctgaccatcgagtctttgtactctggtaccagaagctacaaagataaggcttcatgccgaaatcatatggcctctaaaaacatggccccagcagcttcagtccctttctcgtcgatggtcag

SEQ ID NO: 28738 - RNA, 130 nt, synthetic construct
  source 1..130: mol_type = other RNA
aaggctgtgctgaccatcgagtctttgtactctggtaccagaagctacaaagataaggcttcatgccgaaatcatatggcctctaaaaacatggccccagcagcttcagtccctttctcgtcgatggtca

SEQ ID NO: 28739 - RNA, 129 nt, synthetic construct
  source 1..129: mol_type = other RNA
aaggctgtgctgaccatcgagtctttgtactctggtaccagaagctacaaagataaggcttcatgccgaaatcatatggcctctaaaaacatggccccagcagcttcagtccctttctcgtcgatggtc

SEQ ID NO: 28740 - RNA, 141 nt, synthetic construct
  source 1..141: mol_type = other RNA
aaggctgtgctgaccatcgagtctttgtactctggtaccagaagctacaaagataaggcttcatgccgaaatcagtatggcctctaaaaacatggccccagcagcttcagtccctttctcgtcgatggtcagcacagcctt

SEQ ID NO: 28741 - RNA, 140 nt, synthetic construct
  source 1..140: mol_type = other RNA
aaggctgtgctgaccatcgagtctttgtactctggtaccagaagctacaaagataaggcttcatgccgaaatcagtatggcctctaaaaacatggccccagcagcttcagtccctttctcgtcgatggtcagcacagcct

SEQ ID NO: 28742 - RNA, 139 nt, synthetic construct
  source 1..139: mol_type = other RNA
aaggctgtgctgaccatcgagtctttgtactctggtaccagaagctacaaagataaggcttcatgccgaaatcagtatggcctctaaaaacatggccccagcagcttcagtccctttctcgtcgatggtcagcacagcc

SEQ ID NO: 28743 - RNA, 138 nt, synthetic construct
  source 1..138: mol_type = other RNA
aaggctgtgctgaccatcgagtctttgtactctggtaccagaagctacaaagataaggcttcatgccgaaatcagtatggcctctaaaaacatggccccagcagcttcagtccctttctcgtcgatggtcagcacagc

SEQ ID NO: 28744 - RNA, 137 nt, synthetic construct
  source 1..137: mol_type = other RNA
aaggctgtgctgaccatcgagtctttgtactctggtaccagaagctacaaagataaggcttcatgccgaaatcagtatggcctctaaaaacatggccccagcagcttcagtccctttctcgtcgatggtcagcacag

SEQ ID NO: 28745 - RNA, 136 nt, synthetic construct
  source 1..136: mol_type = other RNA
aaggctgtgctgaccatcgagtctttgtactctggtaccagaagctacaaagataaggcttcatgccgaaatcagtatggcctctaaaaacatggccccagcagcttcagtccctttctcgtcgatggtcagcaca

SEQ ID NO: 28746 - RNA, 135 nt, synthetic construct
  source 1..135: mol_type = other RNA
aaggctgtgctgaccatcgagtctttgtactctggtaccagaagctacaaagataaggcttcatgccgaaatcagtatggcctctaaaaacatggccccagcagcttcagtccctttctcgtcgatggtcagcac

SEQ ID NO: 28747 - RNA, 134 nt, synthetic construct
  source 1..134: mol_type = other RNA
aaggctgtgctgaccatcgagtctttgtactctggtaccagaagctacaaagataaggcttcatgccgaaatcagtatggcctctaaaaacatggccccagcagcttcagtccctttctcgtcgatggtcagca

SEQ ID NO: 28748 - RNA, 133 nt, synthetic construct
  source 1..133: mol_type = other RNA
aaggctgtgctgaccatcgagtctttgtactctggtaccagaagctacaaagataaggcttcatgccgaaatcagtatggcctctaaaaacatggccccagcagcttcagtccctttctcgtcgatggtcagc

SEQ ID NO: 28749 - RNA, 132 nt, synthetic construct
  source 1..132: mol_type = other RNA
aaggctgtgctgaccatcgagtctttgtactctggtaccagaagctacaaagataaggcttcatgccgaaatcagtatggcctctaaaaacatggccccagcagcttcagtccctttctcgtcgatggtcag

SEQ ID NO: 28750 - RNA, 131 nt, synthetic construct
  source 1..131: mol_type = other RNA
aaggctgtgctgaccatcgagtctttgtactctggtaccagaagctacaaagataaggcttcatgccgaaatcagtatggcctctaaaaacatggccccagcagcttcagtccctttctcgtcgatggtca

SEQ ID NO: 28751 - RNA, 130 nt, synthetic construct
  source 1..130: mol_type = other RNA
aaggctgtgctgaccatcgagtctttgtactctggtaccagaagctacaaagataaggcttcatgccgaaatcagtatggcctctaaaaacatggccccagcagcttcagtccctttctcgtcgatggtc

SEQ ID NO: 28752 - RNA, 142 nt, synthetic construct
  source 1..142: mol_type = other RNA
aaggctgtgctgaccatcgagtctttgtactctggtaccagaagctacaaagataaggcttcatgccgaaatcaggtatggcctctaaaaacatggccccagcagcttcagtccctttctcgtcgatggtcagcacagcctt

SEQ ID NO: 28753 - RNA, 141 nt, synthetic construct
  source 1..141: mol_type = other RNA
aaggctgtgctgaccatcgagtctttgtactctggtaccagaagctacaaagataaggcttcatgccgaaatcaggtatggcctctaaaaacatggccccagcagcttcagtccctttctcgtcgatggtcagcacagcct

SEQ ID NO: 28754 - RNA, 140 nt, synthetic construct
  source 1..140: mol_type = other RNA
aaggctgtgctgaccatcgagtctttgtactctggtaccagaagctacaaagataaggcttcatgccgaaatcaggtatggcctctaaaaacatggccccagcagcttcagtccctttctcgtcgatggtcagcacagcc

SEQ ID NO: 28755 - RNA, 139 nt, synthetic construct
  source 1..139: mol_type = other RNA
aaggctgtgctgaccatcgagtctttgtactctggtaccagaagctacaaagataaggcttcatgccgaaatcaggtatggcctctaaaaacatggccccagcagcttcagtccctttctcgtcgatggtcagcacagc

SEQ ID NO: 28756 - RNA, 138 nt, synthetic construct
  source 1..138: mol_type = other RNA
aaggctgtgctgaccatcgagtctttgtactctggtaccagaagctacaaagataaggcttcatgccgaaatcaggtatggcctctaaaaacatggccccagcagcttcagtccctttctcgtcgatggtcagcacag

SEQ ID NO: 28757 - RNA, 137 nt, synthetic construct
  source 1..137: mol_type = other RNA
aaggctgtgctgaccatcgagtctttgtactctggtaccagaagctacaaagataaggcttcatgccgaaatcaggtatggcctctaaaaacatggccccagcagcttcagtccctttctcgtcgatggtcagcaca

SEQ ID NO: 28758 - RNA, 136 nt, synthetic construct
  source 1..136: mol_type = other RNA
aaggctgtgctgaccatcgagtctttgtactctggtaccagaagctacaaagataaggcttcatgccgaaatcaggtatggcctctaaaaacatggccccagcagcttcagtccctttctcgtcgatggtcagcac

SEQ ID NO: 28759 - RNA, 135 nt, synthetic construct
  source 1..135: mol_type = other RNA
aaggctgtgctgaccatcgagtctttgtactctggtaccagaagctacaaagataaggcttcatgccgaaatcaggtatggcctctaaaaacatggccccagcagcttcagtccctttctcgtcgatggtcagca

SEQ ID NO: 28760 - RNA, 134 nt, synthetic construct
  source 1..134: mol_type = other RNA
aaggctgtgctgaccatcgagtctttgtactctggtaccagaagctacaaagataaggcttcatgccgaaatcaggtatggcctctaaaaacatggccccagcagcttcagtccctttctcgtcgatggtcagc

SEQ ID NO: 28761 - RNA, 133 nt, synthetic construct
  source 1..133: mol_type = other RNA
aaggctgtgctgaccatcgagtctttgtactctggtaccagaagctacaaagataaggcttcatgccgaaatcaggtatggcctctaaaaacatggccccagcagcttcagtccctttctcgtcgatggtcag

SEQ ID NO: 28762 - RNA, 96 nt, synthetic construct; identical to SEQ ID NO: 28200
  source 1..96: mol_type = other RNA
  modified_base 1: mod_base = OTHER; note = 2'-O-methyl modified nucleotide with phosphorothioate linkage
  modified_base 2: mod_base = OTHER; note = 2'-O-methyl modified nucleotide with phosphorothioate linkage
  modified_base 3: mod_base = OTHER; note = 2'-O-methyl modified nucleotide with phosphorothioate linkage
  modified_base 93: mod_base = OTHER; note = Nucleotide with phosphorothioate linkage
  modified_base 94: mod_base = OTHER; note = 2'-O-methyl modified nucleotide with phosphorothioate linkage
  modified_base 95: mod_base = OTHER; note = 2'-O-methyl modified nucleotide with phosphorothioate linkage
  modified_base 96: mod_base = OTHER; note = 2'-O-methyl modified nucleotide

SEQ ID NO: 28763 - RNA, 95 nt, synthetic construct; identical to SEQ ID NO: 28201
  source 1..95: mol_type = other RNA
  modified_base 1: mod_base = OTHER; note = 2'-O-methyl modified nucleotide with phosphorothioate linkage
  modified_base 2: mod_base = OTHER; note = 2'-O-methyl modified nucleotide with phosphorothioate linkage
  modified_base 3: mod_base = OTHER; note = 2'-O-methyl modified nucleotide with phosphorothioate linkage
  modified_base 92: mod_base = OTHER; note = Nucleotide with phosphorothioate linkage
  modified_base 93: mod_base = OTHER; note = 2'-O-methyl modified nucleotide with phosphorothioate linkage
  modified_base 94: mod_base = OTHER; note = 2'-O-methyl modified nucleotide with phosphorothioate linkage
  modified_base 95: mod_base = OTHER; note = 2'-O-methyl modified nucleotide

SEQ ID NO: 28764 - RNA, 94 nt, synthetic construct; identical to SEQ ID NO: 28202
  source 1..94: mol_type = other RNA
  modified_base 1: mod_base = OTHER; note = 2'-O-methyl modified nucleotide with phosphorothioate linkage
  modified_base 2: mod_base = OTHER; note = 2'-O-methyl modified nucleotide with phosphorothioate linkage
  modified_base 3: mod_base = OTHER; note = 2'-O-methyl modified nucleotide with phosphorothioate linkage
  modified_base 91: mod_base = OTHER; note = Nucleotide with phosphorothioate linkage
  modified_base 92: mod_base = OTHER; note = 2'-O-methyl modified nucleotide with phosphorothioate linkage
  modified_base 93: mod_base = OTHER; note = 2'-O-methyl modified nucleotide with phosphorothioate linkage
  modified_base 94: mod_base = OTHER; note = 2'-O-methyl modified nucleotide

SEQ ID NO: 28765 - RNA, 93 nt, synthetic construct; identical to SEQ ID NO: 28203
  source 1..93: mol_type = other RNA
  modified_base 1: mod_base = OTHER; note = 2'-O-methyl modified nucleotide with phosphorothioate linkage
  modified_base 2: mod_base = OTHER; note = 2'-O-methyl modified nucleotide with phosphorothioate linkage
  modified_base 3: mod_base = OTHER; note = 2'-O-methyl modified nucleotide with phosphorothioate linkage
  modified_base 90: mod_base = OTHER; note = Nucleotide with phosphorothioate linkage
  modified_base 91: mod_base = OTHER; note = 2'-O-methyl modified nucleotide with phosphorothioate linkage
  modified_base 92: mod_base = OTHER; note = 2'-O-methyl modified nucleotide with phosphorothioate linkage
  modified_base 93: mod_base = OTHER; note = 2'-O-methyl modified nucleotide

SEQ ID NO: 28766 - RNA, 92 nt, synthetic construct; identical to SEQ ID NO: 28204
  source 1..92: mol_type = other RNA
  modified_base 1: mod_base = OTHER; note = 2'-O-methyl modified nucleotide with phosphorothioate linkage
  modified_base 2: mod_base = OTHER; note = 2'-O-methyl modified nucleotide with phosphorothioate linkage
  modified_base 3: mod_base = OTHER; note = 2'-O-methyl modified nucleotide with phosphorothioate linkage
  modified_base 89: mod_base = OTHER; note = Nucleotide with phosphorothioate linkage
  modified_base 90: mod_base = OTHER; note = 2'-O-methyl modified nucleotide with phosphorothioate linkage
  modified_base 91: mod_base = OTHER; note = 2'-O-methyl modified nucleotide with phosphorothioate linkage
  modified_base 92: mod_base = OTHER; note = 2'-O-methyl modified nucleotide

SEQ ID NO: 28767 - RNA, 91 nt, synthetic construct; identical to SEQ ID NO: 28205
  source 1..91: mol_type = other RNA
  modified_base 1: mod_base = OTHER; note = 2'-O-methyl modified nucleotide with phosphorothioate linkage
  modified_base 2: mod_base = OTHER; note = 2'-O-methyl modified nucleotide with phosphorothioate linkage
  modified_base 3: mod_base = OTHER; note = 2'-O-methyl modified nucleotide with phosphorothioate linkage
  modified_base 88: mod_base = OTHER; note = Nucleotide with phosphorothioate linkage
  modified_base 89: mod_base = OTHER; note = 2'-O-methyl modified nucleotide with phosphorothioate linkage
  modified_base 90: mod_base = OTHER; note = 2'-O-methyl modified nucleotide with phosphorothioate linkage
  modified_base 91: mod_base = OTHER; note = 2'-O-methyl modified nucleotide

SEQ ID NO: 28768 - RNA, 90 nt, synthetic construct; identical to SEQ ID NO: 28206
  source 1..90: mol_type = other RNA
  modified_base 1: mod_base = OTHER; note = 2'-O-methyl modified nucleotide with phosphorothioate linkage
  modified_base 2: mod_base = OTHER; note = 2'-O-methyl modified nucleotide with phosphorothioate linkage
  modified_base 3: mod_base = OTHER; note = 2'-O-methyl modified nucleotide with phosphorothioate linkage
  modified_base 87: mod_base = OTHER; note = Nucleotide with phosphorothioate linkage
  modified_base 88: mod_base = OTHER; note = 2'-O-methyl modified nucleotide with phosphorothioate linkage
  modified_base 89: mod_base = OTHER; note = 2'-O-methyl modified nucleotide with phosphorothioate linkage
  modified_base 90: mod_base = OTHER; note = 2'-O-methyl modified nucleotide

SEQ ID NO: 28769 - RNA, 89 nt, synthetic construct; identical to SEQ ID NO: 28207
  source 1..89: mol_type = other RNA
  modified_base 1: mod_base = OTHER; note = 2'-O-methyl modified nucleotide with phosphorothioate linkage
  modified_base 2: mod_base = OTHER; note = 2'-O-methyl modified nucleotide with phosphorothioate linkage
  modified_base 3: mod_base = OTHER; note = 2'-O-methyl modified nucleotide with phosphorothioate linkage
  modified_base 86: mod_base = OTHER; note = Nucleotide with phosphorothioate linkage
  modified_base 87: mod_base = OTHER; note = 2'-O-methyl modified nucleotide with phosphorothioate linkage
  modified_base 88: mod_base = OTHER; note = 2'-O-methyl modified nucleotide with phosphorothioate linkage
  modified_base 89: mod_base = OTHER; note = 2'-O-methyl modified nucleotide

SEQ ID NO: 28770 - RNA, 88 nt, synthetic construct; identical to SEQ ID NO: 28208
  source 1..88: mol_type = other RNA
  modified_base 1: mod_base = OTHER; note = 2'-O-methyl modified nucleotide with phosphorothioate linkage
  modified_base 2: mod_base = OTHER; note = 2'-O-methyl modified nucleotide with phosphorothioate linkage
  modified_base 3: mod_base = OTHER; note = 2'-O-methyl modified nucleotide with phosphorothioate linkage
  modified_base 85: mod_base = OTHER; note = Nucleotide with phosphorothioate linkage
  modified_base 86: mod_base = OTHER; note = 2'-O-methyl modified nucleotide with phosphorothioate linkage
  modified_base 87: mod_base = OTHER; note = 2'-O-methyl modified nucleotide with phosphorothioate linkage
  modified_base 88: mod_base = OTHER; note = 2'-O-methyl modified nucleotide

SEQ ID NO: 28771 - RNA, 87 nt, synthetic construct; identical to SEQ ID NO: 28209
  source 1..87: mol_type = other RNA
  modified_base 1: mod_base = OTHER; note = 2'-O-methyl modified nucleotide with phosphorothioate linkage
  modified_base 2: mod_base = OTHER; note = 2'-O-methyl modified nucleotide with phosphorothioate linkage
  modified_base 3: mod_base = OTHER; note = 2'-O-methyl modified nucleotide with phosphorothioate linkage
  modified_base 84: mod_base = OTHER; note = Nucleotide with phosphorothioate linkage
  modified_base 85: mod_base = OTHER; note = 2'-O-methyl modified nucleotide with phosphorothioate linkage
  modified_base 86: mod_base = OTHER; note = 2'-O-methyl modified nucleotide with phosphorothioate linkage
  modified_base 87: mod_base = OTHER; note = 2'-O-methyl modified nucleotide

SEQ ID NO: 28772 - RNA, 86 nt, synthetic construct; identical to SEQ ID NO: 28210
  source 1..86: mol_type = other RNA
  modified_base 1: mod_base = OTHER; note = 2'-O-methyl modified nucleotide with phosphorothioate linkage
  modified_base 2: mod_base = OTHER; note = 2'-O-methyl modified nucleotide with phosphorothioate linkage
  modified_base 3: mod_base = OTHER; note = 2'-O-methyl modified nucleotide with phosphorothioate linkage
  modified_base 83: mod_base = OTHER; note = Nucleotide with phosphorothioate linkage
  modified_base 84: mod_base = OTHER; note = 2'-O-methyl modified nucleotide with phosphorothioate linkage
  modified_base 85: mod_base = OTHER; note = 2'-O-methyl modified nucleotide with phosphorothioate linkage
  modified_base 86: mod_base = OTHER; note = 2'-O-methyl modified nucleotide

SEQ ID NO: 28773 - RNA, 85 nt, synthetic construct; identical to SEQ ID NO: 28211
  source 1..85: mol_type = other RNA
  modified_base 1: mod_base = OTHER; note = 2'-O-methyl modified nucleotide with phosphorothioate linkage
  modified_base 2: mod_base = OTHER; note = 2'-O-methyl modified nucleotide with phosphorothioate linkage
  modified_base 3: mod_base = OTHER; note = 2'-O-methyl modified nucleotide with phosphorothioate linkage
  modified_base 82: mod_base = OTHER; note = Nucleotide with phosphorothioate linkage
  modified_base 83: mod_base = OTHER; note = 2'-O-methyl modified nucleotide with phosphorothioate linkage
  modified_base 84: mod_base = OTHER; note = 2'-O-methyl modified nucleotide with phosphorothioate linkage
  modified_base 85: mod_base = OTHER; note = 2'-O-methyl modified nucleotide

SEQ ID NO: 28774 - RNA, 97 nt, synthetic construct; identical to SEQ ID NO: 28212
  source 1..97: mol_type = other RNA
  modified_base 1: mod_base = OTHER; note = 2'-O-methyl modified nucleotide with phosphorothioate linkage
  modified_base 2: mod_base = OTHER; note = 2'-O-methyl modified nucleotide with phosphorothioate linkage
  modified_base 3: mod_base = OTHER; note = 2'-O-methyl modified nucleotide with phosphorothioate linkage
  modified_base 94: mod_base = OTHER; note = Nucleotide with phosphorothioate linkage
  modified_base 95: mod_base = OTHER; note = 2'-O-methyl modified nucleotide with phosphorothioate linkage
  modified_base 96: mod_base = OTHER; note = 2'-O-methyl modified nucleotide with phosphorothioate linkage
  modified_base 97: mod_base = OTHER; note = 2'-O-methyl modified nucleotide

SEQ ID NO: 28775 - RNA, 96 nt, synthetic construct; identical to SEQ ID NO: 28213
  source 1..96: mol_type = other RNA
  modified_base 1: mod_base = OTHER; note = 2'-O-methyl modified nucleotide with phosphorothioate linkage
  modified_base 2: mod_base = OTHER; note = 2'-O-methyl modified nucleotide with phosphorothioate linkage
  modified_base 3: mod_base = OTHER; note = 2'-O-methyl modified nucleotide with phosphorothioate linkage
  modified_base 93: mod_base = OTHER; note = Nucleotide with phosphorothioate linkage
  modified_base 94: mod_base = OTHER; note = 2'-O-methyl modified nucleotide with phosphorothioate linkage
  modified_base 95: mod_base = OTHER; note = 2'-O-methyl modified nucleotide with phosphorothioate linkage
  modified_base 96: mod_base = OTHER; note = 2'-O-methyl modified nucleotide

SEQ ID NO: 28776 - RNA, 95 nt, synthetic construct; identical to SEQ ID NO: 28214
  source 1..95: mol_type = other RNA
  modified_base 1: mod_base = OTHER; note = 2'-O-methyl modified nucleotide with phosphorothioate linkage
  modified_base 2: mod_base = OTHER; note = 2'-O-methyl modified nucleotide with phosphorothioate linkage
  modified_base 3: mod_base = OTHER; note = 2'-O-methyl modified nucleotide with phosphorothioate linkage
  modified_base 92: mod_base = OTHER; note = Nucleotide with phosphorothioate linkage
  modified_base 93: mod_base = OTHER; note = 2'-O-methyl modified nucleotide with phosphorothioate linkage
  modified_base 94: mod_base = OTHER; note = 2'-O-methyl modified nucleotide with phosphorothioate linkage
  modified_base 95: mod_base = OTHER; note = 2'-O-methyl modified nucleotide

SEQ ID NO: 28777 - RNA, 94 nt, synthetic construct; identical to SEQ ID NO: 28215
  source 1..94: mol_type = other RNA
  modified_base 1: mod_base = OTHER; note = 2'-O-methyl modified nucleotide with phosphorothioate linkage
  modified_base 2: mod_base = OTHER; note = 2'-O-methyl modified nucleotide with phosphorothioate linkage
  modified_base 3: mod_base = OTHER; note = 2'-O-methyl modified nucleotide with phosphorothioate linkage
  modified_base 91: mod_base = OTHER; note = Nucleotide with phosphorothioate linkage
  modified_base 92: mod_base = OTHER; note = 2'-O-methyl modified nucleotide with phosphorothioate linkage
  modified_base 93: mod_base = OTHER; note = 2'-O-methyl modified nucleotide with phosphorothioate linkage
  modified_base 94: mod_base = OTHER; note = 2'-O-methyl modified nucleotide

SEQ ID NO: 28778 - RNA, 93 nt, synthetic construct; identical to SEQ ID NO: 28216
  source 1..93: mol_type = other RNA
  modified_base 1: mod_base = OTHER; note = 2'-O-methyl modified nucleotide with phosphorothioate linkage
  modified_base 2: mod_base = OTHER; note = 2'-O-methyl modified nucleotide with phosphorothioate linkage
  modified_base 3: mod_base = OTHER; note = 2'-O-methyl modified nucleotide with phosphorothioate linkage
  modified_base 90: mod_base = OTHER; note = Nucleotide with phosphorothioate linkage
  modified_base 91: mod_base = OTHER; note = 2'-O-methyl modified nucleotide with phosphorothioate linkage
  modified_base 92: mod_base = OTHER; note = 2'-O-methyl modified nucleotide with phosphorothioate linkage
  modified_base 93: mod_base = OTHER; note = 2'-O-methyl modified nucleotide

SEQ ID NO: 28779 - RNA, 92 nt, synthetic construct; identical to SEQ ID NO: 28217
  source 1..92: mol_type = other RNA
  modified_base 1: mod_base = OTHER; note = 2'-O-methyl modified nucleotide with phosphorothioate linkage
  modified_base 2: mod_base = OTHER; note = 2'-O-methyl modified nucleotide with phosphorothioate linkage
  modified_base 3: mod_base = OTHER; note = 2'-O-methyl modified nucleotide with phosphorothioate linkage
  modified_base 89: mod_base = OTHER; note = Nucleotide with phosphorothioate linkage
  modified_base 90: mod_base = OTHER; note = 2'-O-methyl modified nucleotide with phosphorothioate linkage
  modified_base 91: mod_base = OTHER; note = 2'-O-methyl modified nucleotide with phosphorothioate linkage
  modified_base 92: mod_base = OTHER; note = 2'-O-methyl modified nucleotide

SEQ ID NO: 28780 - RNA, 91 nt, synthetic construct; identical to SEQ ID NO: 28218
  source 1..91: mol_type = other RNA
  modified_base 1: mod_base = OTHER; note = 2'-O-methyl modified nucleotide with phosphorothioate linkage
  modified_base 2: mod_base = OTHER; note = 2'-O-methyl modified nucleotide with phosphorothioate linkage
  modified_base 3: mod_base = OTHER; note = 2'-O-methyl modified nucleotide with phosphorothioate linkage
  modified_base 88: mod_base = OTHER; note = Nucleotide with phosphorothioate linkage
  modified_base 89: mod_base = OTHER; note = 2'-O-methyl modified nucleotide with phosphorothioate linkage
  modified_base 90: mod_base = OTHER; note = 2'-O-methyl modified nucleotide with phosphorothioate linkage
  modified_base 91: mod_base = OTHER; note = 2'-O-methyl modified nucleotide

SEQ ID NO: 28781 - RNA, 90 nt, synthetic construct; identical to SEQ ID NO: 28219
  source 1..90: mol_type = other RNA
  modified_base 1: mod_base = OTHER; note = 2'-O-methyl modified nucleotide with phosphorothioate linkage
  modified_base 2: mod_base = OTHER; note = 2'-O-methyl modified nucleotide with phosphorothioate linkage
  modified_base 3: mod_base = OTHER; note = 2'-O-methyl modified nucleotide with phosphorothioate linkage
  modified_base 87: mod_base = OTHER; note = Nucleotide with phosphorothioate linkage
  modified_base 88: mod_base = OTHER; note = 2'-O-methyl modified nucleotide with phosphorothioate linkage
  modified_base 89: mod_base = OTHER; note = 2'-O-methyl modified nucleotide with phosphorothioate linkage
  modified_base 90: mod_base = OTHER; note = 2'-O-methyl modified nucleotide

SEQ ID NO: 28782 - RNA, 89 nt, synthetic construct; identical to SEQ ID NO: 28220
  source 1..89: mol_type = other RNA
  modified_base 1: mod_base = OTHER; note = 2'-O-methyl modified nucleotide with phosphorothioate linkage
  modified_base 2: mod_base = OTHER; note = 2'-O-methyl modified nucleotide with phosphorothioate linkage
  modified_base 3: mod_base = OTHER; note = 2'-O-methyl modified nucleotide with phosphorothioate linkage
  modified_base 86: mod_base = OTHER; note = Nucleotide with phosphorothioate linkage
  modified_base 87: mod_base = OTHER; note = 2'-O-methyl modified nucleotide with phosphorothioate linkage
  modified_base 88: mod_base = OTHER; note = 2'-O-methyl modified nucleotide with phosphorothioate linkage
  modified_base 89: mod_base = OTHER; note = 2'-O-methyl modified nucleotide

SEQ ID NO: 28783 - RNA, 88 nt, synthetic construct; identical to SEQ ID NO: 28221
  source 1..88: mol_type = other RNA
  modified_base 1: mod_base = OTHER; note = 2'-O-methyl modified nucleotide with phosphorothioate linkage
  modified_base 2: mod_base = OTHER; note = 2'-O-methyl modified nucleotide with phosphorothioate linkage
  modified_base 3: mod_base = OTHER; note = 2'-O-methyl modified nucleotide with phosphorothioate linkage
  modified_base 85: mod_base = OTHER; note = Nucleotide with phosphorothioate linkage
  modified_base 86: mod_base = OTHER; note = 2'-O-methyl modified nucleotide with phosphorothioate linkage
  modified_base 87: mod_base = OTHER; note = 2'-O-methyl modified nucleotide with phosphorothioate linkage
  modified_base 88: mod_base = OTHER; note = 2'-O-methyl modified nucleotide

SEQ ID NO: 28784 - RNA, 87 nt, synthetic construct; identical to SEQ ID NO: 28222
  source 1..87: mol_type = other RNA
  modified_base 1: mod_base = OTHER; note = 2'-O-methyl modified nucleotide with phosphorothioate linkage
  modified_base 2: mod_base = OTHER; note = 2'-O-methyl modified nucleotide with phosphorothioate linkage
  modified_base 3: mod_base = OTHER; note = 2'-O-methyl modified nucleotide with phosphorothioate linkage
  modified_base 84: mod_base = OTHER; note = Nucleotide with phosphorothioate linkage
  modified_base 85: mod_base = OTHER; note = 2'-O-methyl modified nucleotide with phosphorothioate linkage
  modified_base 86: mod_base = OTHER; note = 2'-O-methyl modified nucleotide with phosphorothioate linkage
  modified_base 87: mod_base = OTHER; note = 2'-O-methyl modified nucleotide

SEQ ID NO: 28785 - RNA, 86 nt, synthetic construct; identical to SEQ ID NO: 28223
  source 1..86: mol_type = other RNA
  modified_base 1: mod_base = OTHER; note = 2'-O-methyl modified nucleotide with phosphorothioate linkage
  modified_base 2: mod_base = OTHER; note = 2'-O-methyl modified nucleotide with phosphorothioate linkage
  modified_base 3: mod_base = OTHER; note = 2'-O-methyl modified nucleotide with phosphorothioate linkage
  modified_base 83: mod_base = OTHER; note = Nucleotide with phosphorothioate linkage
  modified_base 84: mod_base = OTHER; note = 2'-O-methyl modified nucleotide with phosphorothioate linkage
  modified_base 85: mod_base = OTHER; note = 2'-O-methyl modified nucleotide with phosphorothioate linkage
  modified_base 86: mod_base = OTHER; note = 2'-O-methyl modified nucleotide

SEQ ID NO: 28786 - RNA, 98 nt, synthetic construct; identical to SEQ ID NO: 28224
  source 1..98: mol_type = other RNA
  modified_base 1: mod_base = OTHER; note = 2'-O-methyl modified nucleotide with phosphorothioate linkage
  modified_base 2: mod_base = OTHER; note = 2'-O-methyl modified nucleotide with phosphorothioate linkage
  modified_base 3: mod_base = OTHER; note = 2'-O-methyl modified nucleotide with phosphorothioate linkage
  modified_base 95: mod_base = OTHER; note = Nucleotide with phosphorothioate linkage
  modified_base 96: mod_base = OTHER; note = 2'-O-methyl modified nucleotide with phosphorothioate linkage
  modified_base 97: mod_base = OTHER; note = 2'-O-methyl modified nucleotide with phosphorothioate linkage
  modified_base 98: mod_base = OTHER; note = 2'-O-methyl modified nucleotide

SEQ ID NO: 28787 - RNA, 97 nt, synthetic construct; identical to SEQ ID NO: 28225
  source 1..97: mol_type = other RNA
  modified_base 1: mod_base = OTHER; note = 2'-O-methyl modified nucleotide with phosphorothioate linkage
  modified_base 2: mod_base = OTHER; note = 2'-O-methyl modified nucleotide with phosphorothioate linkage
  modified_base 3: mod_base = OTHER; note = 2'-O-methyl modified nucleotide with phosphorothioate linkage
  modified_base 94: mod_base = OTHER; note = Nucleotide with phosphorothioate linkage
  modified_base 95: mod_base = OTHER; note = 2'-O-methyl modified nucleotide with phosphorothioate linkage
  modified_base 96: mod_base = OTHER; note = 2'-O-methyl modified nucleotide with phosphorothioate linkage
  modified_base 97: mod_base = OTHER; note = 2'-O-methyl modified nucleotide

SEQ ID NO: 28788 - RNA, 96 nt, synthetic construct; identical to SEQ ID NO: 28226
  source 1..96: mol_type = other RNA
  modified_base 1: mod_base = OTHER; note = 2'-O-methyl modified nucleotide with phosphorothioate linkage
  modified_base 2: mod_base = OTHER; note = 2'-O-methyl modified nucleotide with phosphorothioate linkage
  modified_base 3: mod_base = OTHER; note = 2'-O-methyl modified nucleotide with phosphorothioate linkage
  modified_base 93: mod_base = OTHER; note = Nucleotide with phosphorothioate linkage
  modified_base 94: mod_base = OTHER; note = 2'-O-methyl modified nucleotide with phosphorothioate linkage
  modified_base 95: mod_base = OTHER; note = 2'-O-methyl modified nucleotide with phosphorothioate linkage
  modified_base 96: mod_base = OTHER; note = 2'-O-methyl modified nucleotide

SEQ ID NO: 28789 - RNA, 95 nt, synthetic construct; identical to SEQ ID NO: 28227
  source 1..95: mol_type = other RNA
  modified_base 1: mod_base = OTHER; note = 2'-O-methyl modified nucleotide with phosphorothioate linkage
  modified_base 2: mod_base = OTHER; note = 2'-O-methyl modified nucleotide with phosphorothioate linkage
  modified_base 3: mod_base = OTHER; note = 2'-O-methyl modified nucleotide with phosphorothioate linkage
  modified_base 92: mod_base = OTHER; note = Nucleotide with phosphorothioate linkage
  modified_base 93: mod_base = OTHER; note = 2'-O-methyl modified nucleotide with phosphorothioate linkage
  modified_base 94: mod_base = OTHER; note = 2'-O-methyl modified nucleotide with phosphorothioate linkage
  modified_base 95: mod_base = OTHER; note = 2'-O-methyl modified nucleotide

SEQ ID NO: 28790 - RNA, 94 nt, synthetic construct; identical to SEQ ID NO: 28228
  source 1..94: mol_type = other RNA
  modified_base 1: mod_base = OTHER; note = 2'-O-methyl modified nucleotide with phosphorothioate linkage
  modified_base 2: mod_base = OTHER; note = 2'-O-methyl modified nucleotide with phosphorothioate linkage
  modified_base 3: mod_base = OTHER; note = 2'-O-methyl modified nucleotide with phosphorothioate linkage
  modified_base 91: mod_base = OTHER; note = Nucleotide with phosphorothioate linkage
  modified_base 92: mod_base = OTHER; note = 2'-O-methyl modified nucleotide with phosphorothioate linkage
  modified_base 93: mod_base = OTHER; note = 2'-O-methyl modified nucleotide with phosphorothioate linkage
  modified_base 94: mod_base = OTHER; note = 2'-O-methyl modified nucleotide

SEQ ID NO: 28791 - RNA, 93 nt, synthetic construct; identical to SEQ ID NO: 28229
  source 1..93: mol_type = other RNA
  modified_base 1: mod_base = OTHER; note = 2'-O-methyl modified nucleotide with phosphorothioate linkage
  modified_base 2: mod_base = OTHER; note = 2'-O-methyl modified nucleotide with phosphorothioate linkage
  modified_base 3: mod_base = OTHER; note = 2'-O-methyl modified nucleotide with phosphorothioate linkage
  modified_base 90: mod_base = OTHER; note = Nucleotide with phosphorothioate linkage
  modified_base 91: mod_base = OTHER; note = 2'-O-methyl modified nucleotide with phosphorothioate linkage
  modified_base 92: mod_base = OTHER; note = 2'-O-methyl modified nucleotide with phosphorothioate linkage
  modified_base 93: mod_base = OTHER; note = 2'-O-methyl modified nucleotide

SEQ ID NO: 28792 - RNA, 92 nt, synthetic construct; identical to SEQ ID NO: 28230
  source 1..92: mol_type = other RNA
  modified_base 1: mod_base = OTHER; note = 2'-O-methyl modified nucleotide with phosphorothioate linkage
  modified_base 2: mod_base = OTHER; note = 2'-O-methyl modified nucleotide with phosphorothioate linkage
  modified_base 3: mod_base = OTHER; note = 2'-O-methyl modified nucleotide with phosphorothioate linkage
  modified_base 89: mod_base = OTHER; note = Nucleotide with phosphorothioate linkage
  modified_base 90: mod_base = OTHER; note = 2'-O-methyl modified nucleotide with phosphorothioate linkage
  modified_base 91: mod_base = OTHER; note = 2'-O-methyl modified nucleotide with phosphorothioate linkage
  modified_base 92: mod_base = OTHER; note = 2'-O-methyl modified nucleotide

SEQ ID NO: 28793 - RNA, 91 nt, synthetic construct; identical to SEQ ID NO: 28231
  source 1..91: mol_type = other RNA
  modified_base 1: mod_base = OTHER; note = 2'-O-methyl modified nucleotide with phosphorothioate linkage
  modified_base 2: mod_base = OTHER; note = 2'-O-methyl modified nucleotide with phosphorothioate linkage
  modified_base 3: mod_base = OTHER; note = 2'-O-methyl modified nucleotide with phosphorothioate linkage
  modified_base 88: mod_base = OTHER; note = Nucleotide with phosphorothioate linkage
  modified_base 89: mod_base = OTHER; note = 2'-O-methyl modified nucleotide with phosphorothioate linkage
  modified_base 90: mod_base = OTHER; note = 2'-O-methyl modified nucleotide with phosphorothioate linkage
  modified_base 91: mod_base = OTHER; note = 2'-O-methyl modified nucleotide

SEQ ID NO: 28794 - RNA, 90 nt, synthetic construct; identical to SEQ ID NO: 28232
  source 1..90: mol_type = other RNA
  modified_base 1: mod_base = OTHER; note = 2'-O-methyl modified nucleotide with phosphorothioate linkage
  modified_base 2: mod_base = OTHER; note = 2'-O-methyl modified nucleotide with phosphorothioate linkage
  modified_base 3: mod_base = OTHER; note = 2'-O-methyl modified nucleotide with phosphorothioate linkage
  modified_base 87: mod_base = OTHER; note = Nucleotide with phosphorothioate linkage
  modified_base 88: mod_base = OTHER; note = 2'-O-methyl modified nucleotide with phosphorothioate linkage
  modified_base 89: mod_base = OTHER; note = 2'-O-methyl modified nucleotide with phosphorothioate linkage
  modified_base 90: mod_base = OTHER; note = 2'-O-methyl modified nucleotide

SEQ ID NO: 28795 - RNA, 89 nt, synthetic construct; identical to SEQ ID NO: 28233
  source 1..89: mol_type = other RNA
  modified_base 1: mod_base = OTHER; note = 2'-O-methyl modified nucleotide with phosphorothioate linkage
  modified_base 2: mod_base = OTHER; note = 2'-O-methyl modified nucleotide with phosphorothioate linkage
  modified_base 3: mod_base = OTHER; note = 2'-O-methyl modified nucleotide with phosphorothioate linkage
  modified_base 86: mod_base = OTHER; note = Nucleotide with phosphorothioate linkage
  modified_base 87: mod_base = OTHER; note = 2'-O-methyl modified nucleotide with phosphorothioate linkage
  modified_base 88: mod_base = OTHER; note = 2'-O-methyl modified nucleotide with phosphorothioate linkage
  modified_base 89: mod_base = OTHER; note = 2'-O-methyl modified nucleotide

SEQ ID NO: 28796 - RNA, 88 nt, synthetic construct; identical to SEQ ID NO: 28234
  source 1..88: mol_type = other RNA
  modified_base 1: mod_base = OTHER; note = 2'-O-methyl modified nucleotide with phosphorothioate linkage
  modified_base 2: mod_base = OTHER; note = 2'-O-methyl modified nucleotide with phosphorothioate linkage
  modified_base 3: mod_base = OTHER; note = 2'-O-methyl modified nucleotide with phosphorothioate linkage
  modified_base 85: mod_base = OTHER; note = Nucleotide with phosphorothioate linkage
  modified_base 86: mod_base = OTHER; note = 2'-O-methyl modified nucleotide with phosphorothioate linkage
  modified_base 87: mod_base = OTHER; note = 2'-O-methyl modified nucleotide with phosphorothioate linkage
  modified_base 88: mod_base = OTHER; note = 2'-O-methyl modified nucleotide

SEQ ID NO: 28797 - RNA, 87 nt, synthetic construct; identical to SEQ ID NO: 28235
  source 1..87: mol_type = other RNA
  modified_base 1: mod_base = OTHER; note = 2'-O-methyl modified nucleotide with phosphorothioate linkage
  modified_base 2: mod_base = OTHER; note = 2'-O-methyl modified nucleotide with phosphorothioate linkage
  modified_base 3: mod_base = OTHER; note = 2'-O-methyl modified nucleotide with phosphorothioate linkage
  modified_base 84: mod_base = OTHER; note = Nucleotide with phosphorothioate linkage
  modified_base 85: mod_base = OTHER; note = 2'-O-methyl modified nucleotide with phosphorothioate linkage
  modified_base 86: mod_base = OTHER; note = 2'-O-methyl modified nucleotide with phosphorothioate linkage
  modified_base 87: mod_base = OTHER; note = 2'-O-methyl modified nucleotide

SEQ ID NO: 28798 - RNA, 99 nt, synthetic construct; identical to SEQ ID NO: 28236
  source 1..99: mol_type = other RNA
  modified_base 1: mod_base = OTHER; note = 2'-O-methyl modified nucleotide with phosphorothioate linkage
  modified_base 2: mod_base = OTHER; note = 2'-O-methyl modified nucleotide with phosphorothioate linkage
  modified_base 3: mod_base = OTHER; note = 2'-O-methyl modified nucleotide with phosphorothioate linkage
  modified_base 96: mod_base = OTHER; note = Nucleotide with phosphorothioate linkage
  modified_base 97: mod_base = OTHER; note = 2'-O-methyl modified nucleotide with phosphorothioate linkage
  modified_base 98: mod_base = OTHER; note = 2'-O-methyl modified nucleotide with phosphorothioate linkage
  modified_base 99: mod_base = OTHER; note = 2'-O-methyl modified nucleotide

SEQ ID NO: 28799 - RNA, 98 nt, synthetic construct; identical to SEQ ID NO: 28237
  source 1..98: mol_type = other RNA
  modified_base 1: mod_base = OTHER; note = 2'-O-methyl modified nucleotide with phosphorothioate linkage
  modified_base 2: mod_base = OTHER; note = 2'-O-methyl modified nucleotide with phosphorothioate linkage
  modified_base 3: mod_base = OTHER; note = 2'-O-methyl modified nucleotide with phosphorothioate linkage
  modified_base 95: mod_base = OTHER; note = Nucleotide with phosphorothioate linkage
  modified_base 96: mod_base = OTHER; note = 2'-O-methyl modified nucleotide with phosphorothioate linkage
  modified_base 97: mod_base = OTHER; note = 2'-O-methyl modified nucleotide with phosphorothioate linkage
  modified_base 98: mod_base = OTHER; note = 2'-O-methyl modified nucleotide

SEQ ID NO: 28800 - RNA, 97 nt, synthetic construct; identical to SEQ ID NO: 28238
  source 1..97: mol_type = other RNA
  modified_base 1: mod_base = OTHER; note = 2'-O-methyl modified nucleotide with phosphorothioate linkage
  modified_base 2: mod_base = OTHER; note = 2'-O-methyl modified nucleotide with phosphorothioate linkage
  modified_base 3: mod_base = OTHER; note = 2'-O-methyl modified nucleotide with phosphorothioate linkage
  modified_base 94: mod_base = OTHER; note = Nucleotide with phosphorothioate linkage
  modified_base 95: mod_base = OTHER; note = 2'-O-methyl modified nucleotide with phosphorothioate linkage
  modified_base 96: mod_base = OTHER; note = 2'-O-methyl modified nucleotide with phosphorothioate linkage
  modified_base 97: mod_base = OTHER; note = 2'-O-methyl modified nucleotide

SEQ ID NO: 28801 - RNA, 96 nt, synthetic construct; identical to SEQ ID NO: 28239
  source 1..96: mol_type = other RNA
  modified_base 1: mod_base = OTHER; note = 2'-O-methyl modified nucleotide with phosphorothioate linkage
  modified_base 2: mod_base = OTHER; note = 2'-O-methyl modified nucleotide with phosphorothioate linkage
  modified_base 3: mod_base = OTHER; note = 2'-O-methyl modified nucleotide with phosphorothioate linkage
  modified_base 93: mod_base = OTHER; note = Nucleotide with phosphorothioate linkage
  modified_base 94: mod_base = OTHER; note = 2'-O-methyl modified nucleotide with phosphorothioate linkage
  modified_base 95: mod_base = OTHER; note = 2'-O-methyl modified nucleotide with phosphorothioate linkage
  modified_base 96: mod_base = OTHER; note = 2'-O-methyl modified nucleotide

SEQ ID NO: 28802 - RNA, 95 nt, synthetic construct; identical to SEQ ID NO: 28240
  source 1..95: mol_type = other RNA
  modified_base 1: mod_base = OTHER; note = 2'-O-methyl modified nucleotide with phosphorothioate linkage
  modified_base 2: mod_base = OTHER; note = 2'-O-methyl modified nucleotide with phosphorothioate linkage
  modified_base 3: mod_base = OTHER; note = 2'-O-methyl modified nucleotide with phosphorothioate linkage
  modified_base 92: mod_base = OTHER; note = Nucleotide with phosphorothioate linkage
  modified_base 93: mod_base = OTHER; note = 2'-O-methyl modified nucleotide with phosphorothioate linkage
  modified_base 94: mod_base = OTHER; note = 2'-O-methyl modified nucleotide with phosphorothioate linkage
  modified_base 95: mod_base = OTHER; note = 2'-O-methyl modified nucleotide

SEQ ID NO: 28803 - RNA, 94 nt, synthetic construct; identical to SEQ ID NO: 28241
  source 1..94: mol_type = other RNA
  modified_base 1: mod_base = OTHER; note = 2'-O-methyl modified nucleotide with phosphorothioate linkage
  modified_base 2: mod_base = OTHER; note = 2'-O-methyl modified nucleotide with phosphorothioate linkage
  modified_base 3: mod_base = OTHER; note = 2'-O-methyl modified nucleotide with phosphorothioate linkage
  modified_base 91: mod_base = OTHER; note = Nucleotide with phosphorothioate linkage
  modified_base 92: mod_base = OTHER; note = 2'-O-methyl modified nucleotide with phosphorothioate linkage
  modified_base 93: mod_base = OTHER; note = 2'-O-methyl modified nucleotide with phosphorothioate linkage
  modified_base 94: mod_base = OTHER; note = 2'-O-methyl modified nucleotide

SEQ ID NO: 28804 - RNA, 93 nt, synthetic construct; identical to SEQ ID NO: 27145
  source 1..93: mol_type = other RNA
  modified_base 1: mod_base = OTHER; note = 2'-O-methyl modified nucleotide with phosphorothioate linkage
  modified_base 2: mod_base = OTHER; note = 2'-O-methyl modified nucleotide with phosphorothioate linkage
  modified_base 3: mod_base = OTHER; note = 2'-O-methyl modified nucleotide with phosphorothioate linkage
  modified_base 90: mod_base = OTHER; note = Nucleotide with phosphorothioate linkage
  modified_base 91: mod_base = OTHER; note = 2'-O-methyl modified nucleotide with phosphorothioate linkage
  modified_base 92: mod_base = OTHER; note = 2'-O-methyl modified nucleotide with phosphorothioate linkage
  modified_base 93: mod_base = OTHER; note = 2'-O-methyl modified nucleotide

SEQ ID NO: 28805 - RNA, 92 nt, synthetic construct; identical to SEQ ID NO: 27146
  source 1..92: mol_type = other RNA
  modified_base 1: mod_base = OTHER; note = 2'-O-methyl modified nucleotide with phosphorothioate linkage
  modified_base 2: mod_base = OTHER; note = 2'-O-methyl modified nucleotide with phosphorothioate linkage
  modified_base 3: mod_base = OTHER; note = 2'-O-methyl modified nucleotide with phosphorothioate linkage
  modified_base 89: mod_base = OTHER; note = Nucleotide with phosphorothioate linkage
  modified_base 90: mod_base = OTHER; note = 2'-O-methyl modified nucleotide with phosphorothioate linkage
  modified_base 91: mod_base = OTHER; note = 2'-O-methyl modified nucleotide with phosphorothioate linkage
  modified_base 92: mod_base = OTHER; note = 2'-O-methyl modified nucleotide

SEQ ID NO: 28806 - RNA, 91 nt, synthetic construct; identical to SEQ ID NO: 27147
  source 1..91: mol_type = other RNA
  modified_base 1: mod_base = OTHER; note = 2'-O-methyl modified nucleotide with phosphorothioate linkage
  modified_base 2: mod_base = OTHER; note = 2'-O-methyl modified nucleotide with phosphorothioate linkage
  modified_base 3: mod_base = OTHER; note = 2'-O-methyl modified nucleotide with phosphorothioate linkage
  modified_base 88: mod_base = OTHER; note = Nucleotide with phosphorothioate linkage
  modified_base 89: mod_base = OTHER; note = 2'-O-methyl modified nucleotide with phosphorothioate linkage
  modified_base 90: mod_base = OTHER; note = 2'-O-methyl modified nucleotide with phosphorothioate linkage
  modified_base 91: mod_base = OTHER; note = 2'-O-methyl modified nucleotide

SEQ ID NO: 28807 - RNA, 90 nt, synthetic construct; identical to SEQ ID NO: 27148
  source 1..90: mol_type = other RNA
  modified_base 1: mod_base = OTHER; note = 2'-O-methyl modified nucleotide with phosphorothioate linkage
  modified_base 2: mod_base = OTHER; note = 2'-O-methyl modified nucleotide with phosphorothioate linkage
  modified_base 3: mod_base = OTHER; note = 2'-O-methyl modified nucleotide with phosphorothioate linkage
  modified_base 87: mod_base = OTHER; note = Nucleotide with phosphorothioate linkage
  modified_base 88: mod_base = OTHER; note = 2'-O-methyl modified nucleotide with phosphorothioate linkage
  modified_base 89: mod_base = OTHER; note = 2'-O-methyl modified nucleotide with phosphorothioate linkage
  modified_base 90: mod_base = OTHER; note = 2'-O-methyl modified nucleotide

SEQ ID NO: 28808 - RNA, 89 nt, synthetic construct; identical to SEQ ID NO: 27149
  source 1..89: mol_type = other RNA
  modified_base 1: mod_base = OTHER; note = 2'-O-methyl modified nucleotide with phosphorothioate linkage
  modified_base 2: mod_base = OTHER; note = 2'-O-methyl modified nucleotide with phosphorothioate linkage
  modified_base 3: mod_base = OTHER; note = 2'-O-methyl modified nucleotide with phosphorothioate linkage
  modified_base 86: mod_base = OTHER; note = Nucleotide with phosphorothioate linkage
  modified_base 87: mod_base = OTHER; note = 2'-O-methyl modified nucleotide with phosphorothioate linkage
  modified_base 88: mod_base = OTHER; note = 2'-O-methyl modified nucleotide with phosphorothioate linkage
  modified_base 89: mod_base = OTHER; note = 2'-O-methyl modified nucleotide

SEQ ID NO: 28809 - RNA, 88 nt, synthetic construct; identical to SEQ ID NO: 27150
  source 1..88: mol_type = other RNA
  modified_base 1: mod_base = OTHER; note = 2'-O-methyl modified nucleotide with phosphorothioate linkage
  modified_base 2: mod_base = OTHER; note = 2'-O-methyl modified nucleotide with phosphorothioate linkage
  modified_base 3: mod_base = OTHER; note = 2'-O-methyl modified nucleotide with phosphorothioate linkage
  modified_base 85: mod_base = OTHER; note = Nucleotide with phosphorothioate linkage
  modified_base 86: mod_base = OTHER; note = 2'-O-methyl modified nucleotide with phosphorothioate linkage
  modified_base 87: mod_base = OTHER; note = 2'-O-methyl modified nucleotide with phosphorothioate linkage
  modified_base 88: mod_base = OTHER; note = 2'-O-methyl modified nucleotide

SEQ ID NO: 28810 - RNA, 100 nt, synthetic construct; identical to SEQ ID NO: 28248
  source 1..100: mol_type = other RNA
  modified_base 1: mod_base = OTHER; note = 2'-O-methyl modified nucleotide with phosphorothioate linkage
  modified_base 2: mod_base = OTHER; note = 2'-O-methyl modified nucleotide with phosphorothioate linkage
  modified_base 3: mod_base = OTHER; note = 2'-O-methyl modified nucleotide with phosphorothioate linkage
  modified_base 97: mod_base = OTHER; note = Nucleotide with phosphorothioate linkage
  modified_base 98: mod_base = OTHER; note = 2'-O-methyl modified nucleotide with phosphorothioate linkage
  modified_base 99: mod_base = OTHER; note = 2'-O-methyl modified nucleotide with phosphorothioate linkage
  modified_base 100: mod_base = OTHER; note = 2'-O-methyl modified nucleotide

SEQ ID NO: 28811 - RNA, 99 nt, synthetic construct; identical to SEQ ID NO: 28249
  source 1..99: mol_type = other RNA
  modified_base 1: mod_base = OTHER; note = 2'-O-methyl modified nucleotide with phosphorothioate linkage
  modified_base 2: mod_base = OTHER; note = 2'-O-methyl modified nucleotide with phosphorothioate linkage
  modified_base 3: mod_base = OTHER; note = 2'-O-methyl modified nucleotide with phosphorothioate linkage
  modified_base 96: mod_base = OTHER; note = Nucleotide with phosphorothioate linkage
  modified_base 97: mod_base = OTHER; note = 2'-O-methyl modified nucleotide with phosphorothioate linkage
  modified_base 98: mod_base = OTHER; note = 2'-O-methyl modified nucleotide with phosphorothioate linkage
  modified_base 99: mod_base = OTHER; note = 2'-O-methyl modified nucleotide

SEQ ID NO: 28812 - RNA, 98 nt, synthetic construct; identical to SEQ ID NO: 28250
  source 1..98: mol_type = other RNA
  modified_base 1: mod_base = OTHER; note = 2'-O-methyl modified nucleotide with phosphorothioate linkage
  modified_base 2: mod_base = OTHER; note = 2'-O-methyl modified nucleotide with phosphorothioate linkage
  modified_base 3: mod_base = OTHER; note = 2'-O-methyl modified nucleotide with phosphorothioate linkage
  modified_base 95: mod_base = OTHER; note = Nucleotide with phosphorothioate linkage
  modified_base 96: mod_base = OTHER; note = 2'-O-methyl modified nucleotide with phosphorothioate linkage
  modified_base 97: mod_base = OTHER; note = 2'-O-methyl modified nucleotide with phosphorothioate linkage
  modified_base 98: mod_base = OTHER; note = 2'-O-methyl modified nucleotide

SEQ ID NO: 28813 - RNA, 97 nt, synthetic construct; identical to SEQ ID NO: 28251
  source 1..97: mol_type = other RNA
  modified_base 1: mod_base = OTHER; note = 2'-O-methyl modified nucleotide with phosphorothioate linkage
  modified_base 2: mod_base = OTHER; note = 2'-O-methyl modified nucleotide with phosphorothioate linkage
  modified_base 3: mod_base = OTHER; note = 2'-O-methyl modified nucleotide with phosphorothioate linkage
  modified_base 94: mod_base = OTHER; note = Nucleotide with phosphorothioate linkage
  modified_base 95: mod_base = OTHER; note = 2'-O-methyl modified nucleotide with phosphorothioate linkage
  modified_base 96: mod_base = OTHER; note = 2'-O-methyl modified nucleotide with phosphorothioate linkage
  modified_base 97: mod_base = OTHER; note = 2'-O-methyl modified nucleotide

SEQ ID NO: 28814 - RNA, 96 nt, synthetic construct; identical to SEQ ID NO: 28252
  source 1..96: mol_type = other RNA
  modified_base 1: mod_base = OTHER; note = 2'-O-methyl modified nucleotide with phosphorothioate linkage
  modified_base 2: mod_base = OTHER; note = 2'-O-methyl modified nucleotide with phosphorothioate linkage
  modified_base 3: mod_base = OTHER; note = 2'-O-methyl modified nucleotide with phosphorothioate linkage
  modified_base 93: mod_base = OTHER; note = Nucleotide with phosphorothioate linkage
  modified_base 94: mod_base = OTHER; note = 2'-O-methyl modified nucleotide with phosphorothioate linkage
  modified_base 95: mod_base = OTHER; note = 2'-O-methyl modified nucleotide with phosphorothioate linkage
  modified_base 96: mod_base = OTHER; note = 2'-O-methyl modified nucleotide

SEQ ID NO: 28815 - RNA, 95 nt, synthetic construct; identical to SEQ ID NO: 27151
  source 1..95: mol_type = other RNA
  modified_base 1: mod_base = OTHER; note = 2'-O-methyl modified nucleotide with phosphorothioate linkage
  modified_base 2: mod_base = OTHER; note = 2'-O-methyl modified nucleotide with phosphorothioate linkage
  modified_base 3: mod_base = OTHER; note = 2'-O-methyl modified nucleotide with phosphorothioate linkage
  modified_base 92: mod_base = OTHER; note = Nucleotide with phosphorothioate linkage
  modified_base 93: mod_base = OTHER; note = 2'-O-methyl modified nucleotide with phosphorothioate linkage
  modified_base 94: mod_base = OTHER; note = 2'-O-methyl modified nucleotide with phosphorothioate linkage
  modified_base 95: mod_base = OTHER; note = 2'-O-methyl modified nucleotide

SEQ ID NO: 28816 - RNA, 94 nt, synthetic construct; identical to SEQ ID NO: 27152
  source 1..94: mol_type = other RNA
  modified_base 1: mod_base = OTHER; note = 2'-O-methyl modified nucleotide with phosphorothioate linkage
  modified_base 2: mod_base = OTHER; note = 2'-O-methyl modified nucleotide with phosphorothioate linkage
  modified_base 3: mod_base = OTHER; note = 2'-O-methyl modified nucleotide with phosphorothioate linkage
  modified_base 91: mod_base = OTHER; note = Nucleotide with phosphorothioate linkage
  modified_base 92: mod_base = OTHER; note = 2'-O-methyl modified nucleotide with phosphorothioate linkage
  modified_base 93: mod_base = OTHER; note = 2'-O-methyl modified nucleotide with phosphorothioate linkage
  modified_base 94: mod_base = OTHER; note = 2'-O-methyl modified nucleotide

SEQ ID NO: 28817 - RNA, 93 nt, synthetic construct; identical to SEQ ID NO: 27153
  source 1..93: mol_type = other RNA
  modified_base 1: mod_base = OTHER; note = 2'-O-methyl modified nucleotide with phosphorothioate linkage
  modified_base 2: mod_base = OTHER; note = 2'-O-methyl modified nucleotide with phosphorothioate linkage
  modified_base 3: mod_base = OTHER; note = 2'-O-methyl modified nucleotide with phosphorothioate linkage
  modified_base 90: mod_base = OTHER; note = Nucleotide with phosphorothioate linkage
  modified_base 91: mod_base = OTHER; note = 2'-O-methyl modified nucleotide with phosphorothioate linkage
  modified_base 92: mod_base = OTHER; note = 2'-O-methyl modified nucleotide with phosphorothioate linkage
  modified_base 93: mod_base = OTHER; note = 2'-O-methyl modified nucleotide

SEQ ID NO: 28818 - RNA, 92 nt, synthetic construct; identical to SEQ ID NO: 27154
  source 1..92: mol_type = other RNA
  modified_base 1: mod_base = OTHER; note = 2'-O-methyl modified nucleotide with phosphorothioate linkage
  modified_base 2: mod_base = OTHER; note = 2'-O-methyl modified nucleotide with phosphorothioate linkage
  modified_base 3: mod_base = OTHER; note = 2'-O-methyl modified nucleotide with phosphorothioate linkage
  modified_base 89: mod_base = OTHER; note = Nucleotide with phosphorothioate linkage
  modified_base 90: mod_base = OTHER; note = 2'-O-methyl modified nucleotide with phosphorothioate linkage
  modified_base 91: mod_base = OTHER; note = 2'-O-methyl modified nucleotide with phosphorothioate linkage
  modified_base 92: mod_base = OTHER; note = 2'-O-methyl modified nucleotide

SEQ ID NO: 28819 - RNA, 91 nt, synthetic construct; identical to SEQ ID NO: 27155
  source 1..91: mol_type = other RNA
  modified_base 1: mod_base = OTHER; note = 2'-O-methyl modified nucleotide with phosphorothioate linkage
  modified_base 2: mod_base = OTHER; note = 2'-O-methyl modified nucleotide with phosphorothioate linkage
  modified_base 3: mod_base = OTHER; note = 2'-O-methyl modified nucleotide with phosphorothioate linkage
  modified_base 88: mod_base = OTHER; note = Nucleotide with phosphorothioate linkage
  modified_base 89: mod_base = OTHER; note = 2'-O-methyl modified nucleotide with phosphorothioate linkage
  modified_base 90: mod_base = OTHER; note = 2'-O-methyl modified nucleotide with phosphorothioate linkage
  modified_base 91: mod_base = OTHER; note = 2'-O-methyl modified nucleotide

SEQ ID NO: 28820 - RNA, 90 nt, synthetic construct; identical to SEQ ID NO: 27156
  source 1..90: mol_type = other RNA
  modified_base 1: mod_base = OTHER; note = 2'-O-methyl modified nucleotide with phosphorothioate linkage
  modified_base 2: mod_base = OTHER; note = 2'-O-methyl modified nucleotide with phosphorothioate linkage
  modified_base 3: mod_base = OTHER; note = 2'-O-methyl modified nucleotide with phosphorothioate linkage
  modified_base 87: mod_base = OTHER; note = Nucleotide with phosphorothioate linkage
  modified_base 88: mod_base = OTHER; note = 2'-O-methyl modified nucleotide with phosphorothioate linkage
  modified_base 89: mod_base = OTHER; note = 2'-O-methyl modified nucleotide with phosphorothioate linkage
  modified_base 90: mod_base = OTHER; note = 2'-O-methyl modified nucleotide

SEQ ID NO: 28821 - RNA, 89 nt, synthetic construct; identical to SEQ ID NO: 27131
  source 1..89: mol_type = other RNA
  modified_base 1: mod_base = OTHER; note = 2'-O-methyl modified nucleotide with phosphorothioate linkage
  modified_base 2: mod_base = OTHER; note = 2'-O-methyl modified nucleotide with phosphorothioate linkage
  modified_base 3: mod_base = OTHER; note = 2'-O-methyl modified nucleotide with phosphorothioate linkage
  modified_base 86: mod_base = OTHER; note = Nucleotide with phosphorothioate linkage
  modified_base 87: mod_base = OTHER; note = 2'-O-methyl modified nucleotide with phosphorothioate linkage
  modified_base 88: mod_base = OTHER; note = 2'-O-methyl modified nucleotide with phosphorothioate linkage
  modified_base 89: mod_base = OTHER; note = 2'-O-methyl modified nucleotide

SEQ ID NO: 28822 - RNA, 101 nt, synthetic construct; identical to SEQ ID NO: 28260
  source 1..101: mol_type = other RNA
  modified_base 1: mod_base = OTHER; note = 2'-O-methyl modified nucleotide with phosphorothioate linkage
  modified_base 2: mod_base = OTHER; note = 2'-O-methyl modified nucleotide with phosphorothioate linkage
  modified_base 3: mod_base = OTHER; note = 2'-O-methyl modified nucleotide with phosphorothioate linkage
  modified_base 98: mod_base = OTHER; note = Nucleotide with phosphorothioate linkage
  modified_base 99: mod_base = OTHER; note = 2'-O-methyl modified nucleotide with phosphorothioate linkage
  modified_base 100: mod_base = OTHER; note = 2'-O-methyl modified nucleotide with phosphorothioate linkage
  modified_base 101: mod_base = OTHER; note = 2'-O-methyl modified nucleotide

SEQ ID NO: 28823 - RNA, 100 nt, synthetic construct; identical to SEQ ID NO: 28261
  source 1..100: mol_type = other RNA
  modified_base 1: mod_base = OTHER; note = 2'-O-methyl modified nucleotide with phosphorothioate linkage
  modified_base 2: mod_base = OTHER; note = 2'-O-methyl modified nucleotide with phosphorothioate linkage
  modified_base 3: mod_base = OTHER; note = 2'-O-methyl modified nucleotide with phosphorothioate linkage
  modified_base 97: mod_base = OTHER; note = Nucleotide with phosphorothioate linkage
  modified_base 98: mod_base = OTHER; note = 2'-O-methyl modified nucleotide with phosphorothioate linkage
  modified_base 99: mod_base = OTHER; note = 2'-O-methyl modified nucleotide with phosphorothioate linkage
  modified_base 100: mod_base = OTHER; note = 2'-O-methyl modified nucleotide

SEQ ID NO: 28824 - RNA, 99 nt, synthetic construct; identical to SEQ ID NO: 28262
  source 1..99: mol_type = other RNA
  modified_base 1: mod_base = OTHER; note = 2'-O-methyl modified nucleotide with phosphorothioate linkage
  modified_base 2: mod_base = OTHER; note = 2'-O-methyl modified nucleotide with phosphorothioate linkage
  modified_base 3: mod_base = OTHER; note = 2'-O-methyl modified nucleotide with phosphorothioate linkage
  modified_base 96: mod_base = OTHER; note = Nucleotide with phosphorothioate linkage
  modified_base 97: mod_base = OTHER; note = 2'-O-methyl modified nucleotide with phosphorothioate linkage
  modified_base 98: mod_base = OTHER; note = 2'-O-methyl modified nucleotide with phosphorothioate linkage
  modified_base 99: mod_base = OTHER; note = 2'-O-methyl modified nucleotide

SEQ ID NO: 28825 - RNA, 98 nt, synthetic construct; identical to SEQ ID NO: 28263
  source 1..98: mol_type = other RNA
  modified_base 1: mod_base = OTHER; note = 2'-O-methyl modified nucleotide with phosphorothioate linkage
  modified_base 2: mod_base = OTHER; note = 2'-O-methyl modified nucleotide with phosphorothioate linkage
  modified_base 3: mod_base = OTHER; note = 2'-O-methyl modified nucleotide with phosphorothioate linkage
  modified_base 95: mod_base = OTHER; note = Nucleotide with phosphorothioate linkage
  modified_base 96: mod_base = OTHER; note = 2'-O-methyl modified nucleotide with phosphorothioate linkage
  modified_base 97: mod_base = OTHER; note = 2'-O-methyl modified nucleotide with phosphorothioate linkage
  modified_base 98: mod_base = OTHER; note = 2'-O-methyl modified nucleotide

SEQ ID NO: 28826 - RNA, 97 nt, synthetic construct; identical to SEQ ID NO: 28264
  source 1..97: mol_type = other RNA
  modified_base 1: mod_base = OTHER; note = 2'-O-methyl modified nucleotide with phosphorothioate linkage
  modified_base 2: mod_base = OTHER; note = 2'-O-methyl modified nucleotide with phosphorothioate linkage
  modified_base 3: mod_base = OTHER; note = 2'-O-methyl modified nucleotide with phosphorothioate linkage
  modified_base 94: mod_base = OTHER; note = Nucleotide with phosphorothioate linkage
  modified_base 95: mod_base = OTHER; note = 2'-O-methyl modified nucleotide with phosphorothioate linkage
  modified_base 96: mod_base = OTHER; note = 2'-O-methyl modified nucleotide with phosphorothioate linkage
  modified_base 97: mod_base = OTHER; note = 2'-O-methyl modified nucleotide

SEQ ID NO: 28827 - RNA, 96 nt, synthetic construct; identical to SEQ ID NO: 28265
  source 1..96: mol_type = other RNA
  modified_base 1: mod_base = OTHER; note = 2'-O-methyl modified nucleotide with phosphorothioate linkage
  modified_base 2: mod_base = OTHER; note = 2'-O-methyl modified nucleotide with phosphorothioate linkage
  modified_base 3: mod_base = OTHER; note = 2'-O-methyl modified nucleotide with phosphorothioate linkage
  modified_base 93: mod_base = OTHER; note = Nucleotide with phosphorothioate linkage
  modified_base 94: mod_base = OTHER; note = 2'-O-methyl modified nucleotide with phosphorothioate linkage
  modified_base 95: mod_base = OTHER; note = 2'-O-methyl modified nucleotide with phosphorothioate linkage
  modified_base 96: mod_base = OTHER; note = 2'-O-methyl modified nucleotide

SEQ ID NO: 28828 - RNA, 95 nt, synthetic construct; identical to SEQ ID NO: 27158
  source 1..95: mol_type = other RNA
  modified_base 1: mod_base = OTHER; note = 2'-O-methyl modified nucleotide with phosphorothioate linkage
  modified_base 2: mod_base = OTHER; note = 2'-O-methyl modified nucleotide with phosphorothioate linkage
  modified_base 3: mod_base = OTHER; note = 2'-O-methyl modified nucleotide with phosphorothioate linkage
  modified_base 92: mod_base = OTHER; note = Nucleotide with phosphorothioate linkage
  modified_base 93: mod_base = OTHER; note = 2'-O-methyl modified nucleotide with phosphorothioate linkage
  modified_base 94: mod_base = OTHER; note = 2'-O-methyl modified nucleotide with phosphorothioate linkage
  modified_base 95: mod_base = OTHER; note = 2'-O-methyl modified nucleotide

SEQ ID NO: 28829 - RNA, 94 nt, synthetic construct; identical to SEQ ID NO: 27159
  source 1..94: mol_type = other RNA
  modified_base 1: mod_base = OTHER; note = 2'-O-methyl modified nucleotide with phosphorothioate linkage
  modified_base 2: mod_base = OTHER; note = 2'-O-methyl modified nucleotide with phosphorothioate linkage
  modified_base 3: mod_base = OTHER; note = 2'-O-methyl modified nucleotide with phosphorothioate linkage
  modified_base 91: mod_base = OTHER; note = Nucleotide with phosphorothioate linkage
  modified_base 92: mod_base = OTHER; note = 2'-O-methyl modified nucleotide with phosphorothioate linkage
  modified_base 93: mod_base = OTHER; note = 2'-O-methyl modified nucleotide with phosphorothioate linkage
  modified_base 94: mod_base = OTHER; note = 2'-O-methyl modified nucleotide

SEQ ID NO: 28830 - RNA, 93 nt, synthetic construct; identical to SEQ ID NO: 27091
  source 1..93: mol_type = other RNA
  modified_base 1: mod_base = OTHER; note = 2'-O-methyl modified nucleotide with phosphorothioate linkage
  modified_base 2: mod_base = OTHER; note = 2'-O-methyl modified nucleotide with phosphorothioate linkage
  modified_base 3: mod_base = OTHER; note = 2'-O-methyl modified nucleotide with phosphorothioate linkage
  modified_base 90: mod_base = OTHER; note = Nucleotide with phosphorothioate linkage
  modified_base 91: mod_base = OTHER; note = 2'-O-methyl modified nucleotide with phosphorothioate linkage
  modified_base 92: mod_base = OTHER; note = 2'-O-methyl modified nucleotide with phosphorothioate linkage
  modified_base 93: mod_base = OTHER; note = 2'-O-methyl modified nucleotide

SEQ ID NO: 28831 - RNA, 92 nt, synthetic construct; identical to SEQ ID NO: 27001
  source 1..92: mol_type = other RNA
  modified_base 1: mod_base = OTHER; note = 2'-O-methyl modified nucleotide with phosphorothioate linkage
  modified_base 2: mod_base = OTHER; note = 2'-O-methyl modified nucleotide with phosphorothioate linkage
  modified_base 3: mod_base = OTHER; note = 2'-O-methyl modified nucleotide with phosphorothioate linkage
  modified_base 89: mod_base = OTHER; note = Nucleotide with phosphorothioate linkage
  modified_base 90: mod_base = OTHER; note = 2'-O-methyl modified nucleotide with phosphorothioate linkage
  modified_base 91: mod_base = OTHER; note = 2'-O-methyl modified nucleotide with phosphorothioate linkage
  modified_base 92: mod_base = OTHER; note = 2'-O-methyl modified nucleotide

SEQ ID NO: 28832 - RNA, 91 nt, synthetic construct; identical to SEQ ID NO: 27162
  source 1..91: mol_type = other RNA
  modified_base 1: mod_base = OTHER; note = 2'-O-methyl modified nucleotide with phosphorothioate linkage
  modified_base 2: mod_base = OTHER; note = 2'-O-methyl modified nucleotide with phosphorothioate linkage
  modified_base 3: mod_base = OTHER; note = 2'-O-methyl modified nucleotide with phosphorothioate linkage
  modified_base 88: mod_base = OTHER; note = Nucleotide with phosphorothioate linkage
  modified_base 89: mod_base = OTHER; note = 2'-O-methyl modified nucleotide with phosphorothioate linkage
  modified_base 90: mod_base = OTHER; note = 2'-O-methyl modified nucleotide with phosphorothioate linkage
  modified_base 91: mod_base = OTHER; note = 2'-O-methyl modified nucleotide

SEQ ID NO: 28833 - RNA, 90 nt, synthetic construct; identical to SEQ ID NO: 27163
  source 1..90: mol_type = other RNA
  modified_base 1: mod_base = OTHER; note = 2'-O-methyl modified nucleotide with phosphorothioate linkage
  modified_base 2: mod_base = OTHER; note = 2'-O-methyl modified nucleotide with phosphorothioate linkage
  modified_base 3: mod_base = OTHER; note = 2'-O-methyl modified nucleotide with phosphorothioate linkage
  modified_base 87: mod_base = OTHER; note = Nucleotide with phosphorothioate linkage
  modified_base 88: mod_base = OTHER; note = 2'-O-methyl modified nucleotide with phosphorothioate linkage
  modified_base 89: mod_base = OTHER; note = 2'-O-methyl modified nucleotide with phosphorothioate linkage
  modified_base 90: mod_base = OTHER; note = 2'-O-methyl modified nucleotide

SEQ ID NO: 28834 - RNA, 102 nt, synthetic construct; identical to SEQ ID NO: 28272
  source 1..102: mol_type = other RNA
  modified_base 1: mod_base = OTHER; note = 2'-O-methyl modified nucleotide with phosphorothioate linkage
  modified_base 2: mod_base = OTHER; note = 2'-O-methyl modified nucleotide with phosphorothioate linkage
  modified_base 3: mod_base = OTHER; note = 2'-O-methyl modified nucleotide with phosphorothioate linkage
  modified_base 99: mod_base = OTHER; note = Nucleotide with phosphorothioate linkage
  modified_base 100: mod_base = OTHER; note = 2'-O-methyl modified nucleotide with phosphorothioate linkage
  modified_base 101: mod_base = OTHER; note = 2'-O-methyl modified nucleotide with phosphorothioate linkage
  modified_base 102: mod_base = OTHER; note = 2'-O-methyl modified nucleotide

SEQ ID NO: 28835 - RNA, 101 nt, synthetic construct; identical to SEQ ID NO: 28273
  source 1..101: mol_type = other RNA
  modified_base 1: mod_base = OTHER; note = 2'-O-methyl modified nucleotide with phosphorothioate linkage
  modified_base 2: mod_base = OTHER; note = 2'-O-methyl modified nucleotide with phosphorothioate linkage
  modified_base 3: mod_base = OTHER; note = 2'-O-methyl modified nucleotide with phosphorothioate linkage
  modified_base 98: mod_base = OTHER; note = Nucleotide with phosphorothioate linkage
  modified_base 99: mod_base = OTHER; note = 2'-O-methyl modified nucleotide with phosphorothioate linkage
  modified_base 100: mod_base = OTHER; note = 2'-O-methyl modified nucleotide with phosphorothioate linkage
  modified_base 101: mod_base = OTHER; note = 2'-O-methyl modified nucleotide

SEQ ID NO: 28836 - RNA, 100 nt, synthetic construct; identical to SEQ ID NO: 28274
  source 1..100: mol_type = other RNA
  modified_base 1: mod_base = OTHER; note = 2'-O-methyl modified nucleotide with phosphorothioate linkage
  modified_base 2: mod_base = OTHER; note = 2'-O-methyl modified nucleotide with phosphorothioate linkage
  modified_base 3: mod_base = OTHER; note = 2'-O-methyl modified nucleotide with phosphorothioate linkage
  modified_base 97: mod_base = OTHER; note = Nucleotide with phosphorothioate linkage
  modified_base 98: mod_base = OTHER; note = 2'-O-methyl modified nucleotide with phosphorothioate linkage
  modified_base 99: mod_base = OTHER; note = 2'-O-methyl modified nucleotide with phosphorothioate linkage
  modified_base 100: mod_base = OTHER; note = 2'-O-methyl modified nucleotide

SEQ ID NO: 28837 - RNA, 99 nt, synthetic construct; identical to SEQ ID NO: 28275
  source 1..99: mol_type = other RNA
  modified_base 1: mod_base = OTHER; note = 2'-O-methyl modified nucleotide with phosphorothioate linkage
  modified_base 2: mod_base = OTHER; note = 2'-O-methyl modified nucleotide with phosphorothioate linkage
  modified_base 3: mod_base = OTHER; note = 2'-O-methyl modified nucleotide with phosphorothioate linkage
  modified_base 96: mod_base = OTHER; note = Nucleotide with phosphorothioate linkage
  modified_base 97: mod_base = OTHER; note = 2'-O-methyl modified nucleotide with phosphorothioate linkage
  modified_base 98: mod_base = OTHER; note = 2'-O-methyl modified nucleotide with phosphorothioate linkage
  modified_base 99: mod_base = OTHER; note = 2'-O-methyl modified nucleotide

SEQ ID NO: 28838 - RNA, 98 nt, synthetic construct; identical to SEQ ID NO: 28276
  source 1..98: mol_type = other RNA
  modified_base 1: mod_base = OTHER; note = 2'-O-methyl modified nucleotide with phosphorothioate linkage
  modified_base 2: mod_base = OTHER; note = 2'-O-methyl modified nucleotide with phosphorothioate linkage
  modified_base 3: mod_base = OTHER; note = 2'-O-methyl modified nucleotide with phosphorothioate linkage
  modified_base 95: mod_base = OTHER; note = Nucleotide with phosphorothioate linkage
  modified_base 96: mod_base = OTHER; note = 2'-O-methyl modified nucleotide with phosphorothioate linkage
  modified_base 97: mod_base = OTHER; note = 2'-O-methyl modified nucleotide with phosphorothioate linkage
  modified_base 98: mod_base = OTHER; note = 2'-O-methyl modified nucleotide

SEQ ID NO: 28839 - RNA, 97 nt, synthetic construct; identical to SEQ ID NO: 27164
  source 1..97: mol_type = other RNA
  modified_base 1: mod_base = OTHER; note = 2'-O-methyl modified nucleotide with phosphorothioate linkage
  modified_base 2: mod_base = OTHER; note = 2'-O-methyl modified nucleotide with phosphorothioate linkage
  modified_base 3: mod_base = OTHER; note = 2'-O-methyl modified nucleotide with phosphorothioate linkage
  modified_base 94: mod_base = OTHER; note = Nucleotide with phosphorothioate linkage
  modified_base 95: mod_base = OTHER; note = 2'-O-methyl modified nucleotide with phosphorothioate linkage
  modified_base 96: mod_base = OTHER; note = 2'-O-methyl modified nucleotide with phosphorothioate linkage
  modified_base 97: mod_base = OTHER; note = 2'-O-methyl modified nucleotide

SEQ ID NO: 28840 - RNA, 96 nt, synthetic construct; identical to SEQ ID NO: 27165
  source 1..96: mol_type = other RNA
  modified_base 1: mod_base = OTHER; note = 2'-O-methyl modified nucleotide with phosphorothioate linkage
  modified_base 2: mod_base = OTHER; note = 2'-O-methyl modified nucleotide with phosphorothioate linkage
  modified_base 3: mod_base = OTHER; note = 2'-O-methyl modified nucleotide with phosphorothioate linkage
  modified_base 93: mod_base = OTHER; note = Nucleotide with phosphorothioate linkage
  modified_base 94: mod_base = OTHER; note = 2'-O-methyl modified nucleotide with phosphorothioate linkage
  modified_base 95: mod_base = OTHER; note = 2'-O-methyl modified nucleotide with phosphorothioate linkage
  modified_base 96: mod_base = OTHER; note = 2'-O-methyl modified nucleotide

SEQ ID NO: 28841 - RNA, 95 nt, synthetic construct; identical to SEQ ID NO: 27166
  source 1..95: mol_type = other RNA
  modified_base 1: mod_base = OTHER; note = 2'-O-methyl modified nucleotide with phosphorothioate linkage
  modified_base 2: mod_base = OTHER; note = 2'-O-methyl modified nucleotide with phosphorothioate linkage
  modified_base 3: mod_base = OTHER; note = 2'-O-methyl modified nucleotide with phosphorothioate linkage
  modified_base 92: mod_base = OTHER; note = Nucleotide with phosphorothioate linkage
  modified_base 93: mod_base = OTHER; note = 2'-O-methyl modified nucleotide with phosphorothioate linkage
  modified_base 94: mod_base = OTHER; note = 2'-O-methyl modified nucleotide with phosphorothioate linkage
  modified_base 95: mod_base = OTHER; note = 2'-O-methyl modified nucleotide

SEQ ID NO: 28842 - RNA, 94 nt, synthetic construct; identical to SEQ ID NO: 27167
  source 1..94: mol_type = other RNA
  modified_base 1: mod_base = OTHER; note = 2'-O-methyl modified nucleotide with phosphorothioate linkage
  modified_base 2: mod_base = OTHER; note = 2'-O-methyl modified nucleotide with phosphorothioate linkage
  modified_base 3: mod_base = OTHER; note = 2'-O-methyl modified nucleotide with phosphorothioate linkage
  modified_base 91: mod_base = OTHER; note = Nucleotide with phosphorothioate linkage
  modified_base 92: mod_base = OTHER; note = 2'-O-methyl modified nucleotide with phosphorothioate linkage
  modified_base 93: mod_base = OTHER; note = 2'-O-methyl modified nucleotide with phosphorothioate linkage
  modified_base 94: mod_base = OTHER; note = 2'-O-methyl modified nucleotide

SEQ ID NO: 28843 - RNA, 93 nt, synthetic construct; identical to SEQ ID NO: 27168
  source 1..93: mol_type = other RNA
  modified_base 1: mod_base = OTHER; note = 2'-O-methyl modified nucleotide with phosphorothioate linkage
  modified_base 2: mod_base = OTHER; note = 2'-O-methyl modified nucleotide with phosphorothioate linkage
  modified_base 3: mod_base = OTHER; note = 2'-O-methyl modified nucleotide with phosphorothioate linkage
  modified_base 90: mod_base = OTHER; note = Nucleotide with phosphorothioate linkage
  modified_base 91: mod_base = OTHER; note = 2'-O-methyl modified nucleotide with phosphorothioate linkage
  modified_base 92: mod_base = OTHER; note = 2'-O-methyl modified nucleotide with phosphorothioate linkage
  modified_base 93: mod_base = OTHER; note = 2'-O-methyl modified nucleotide

SEQ ID NO: 28844 - RNA, 92 nt, synthetic construct; identical to SEQ ID NO: 27169
  source 1..92: mol_type = other RNA
  modified_base 1: mod_base = OTHER; note = 2'-O-methyl modified nucleotide with phosphorothioate linkage
  modified_base 2: mod_base = OTHER; note = 2'-O-methyl modified nucleotide with phosphorothioate linkage
  modified_base 3: mod_base = OTHER; note = 2'-O-methyl modified nucleotide with phosphorothioate linkage
  modified_base 89: mod_base = OTHER; note = Nucleotide with phosphorothioate linkage
  modified_base 90: mod_base = OTHER; note = 2'-O-methyl modified nucleotide with phosphorothioate linkage
  modified_base 91: mod_base = OTHER; note = 2'-O-methyl modified nucleotide with phosphorothioate linkage
  modified_base 92: mod_base = OTHER; note = 2'-O-methyl modified nucleotide

SEQ ID NO: 28845 - RNA, 91 nt, synthetic construct; identical to SEQ ID NO: 27170
  source 1..91: mol_type = other RNA
  modified_base 1: mod_base = OTHER; note = 2'-O-methyl modified nucleotide with phosphorothioate linkage
  modified_base 2: mod_base = OTHER; note = 2'-O-methyl modified nucleotide with phosphorothioate linkage
  modified_base 3: mod_base = OTHER; note = 2'-O-methyl modified nucleotide with phosphorothioate linkage
  modified_base 88: mod_base = OTHER; note = Nucleotide with phosphorothioate linkage
  modified_base 89: mod_base = OTHER; note = 2'-O-methyl modified nucleotide with phosphorothioate linkage
  modified_base 90: mod_base = OTHER; note = 2'-O-methyl modified nucleotide with phosphorothioate linkage
  modified_base 91: mod_base = OTHER; note = 2'-O-methyl modified nucleotide

SEQ ID NO: 28846 - RNA, 103 nt, synthetic construct; identical to SEQ ID NO: 28284
  source 1..103: mol_type = other RNA
  modified_base 1: mod_base = OTHER; note = 2'-O-methyl modified nucleotide with phosphorothioate linkage
  modified_base 2: mod_base = OTHER; note = 2'-O-methyl modified nucleotide with phosphorothioate linkage
  modified_base 3: mod_base = OTHER; note = 2'-O-methyl modified nucleotide with phosphorothioate linkage
  modified_base 100: mod_base = OTHER; note = Nucleotide with phosphorothioate linkage
  modified_base 101: mod_base = OTHER; note = 2'-O-methyl modified nucleotide with phosphorothioate linkage
  modified_base 102: mod_base = OTHER; note = 2'-O-methyl modified nucleotide with phosphorothioate linkage
  modified_base 103: mod_base = OTHER; note = 2'-O-methyl modified nucleotide

SEQ ID NO: 28847 - RNA, 102 nt, synthetic construct; identical to SEQ ID NO: 28285
  source 1..102: mol_type = other RNA
  modified_base 1: mod_base = OTHER; note = 2'-O-methyl modified nucleotide with phosphorothioate linkage
  modified_base 2: mod_base = OTHER; note = 2'-O-methyl modified nucleotide with phosphorothioate linkage
  modified_base 3: mod_base = OTHER; note = 2'-O-methyl modified nucleotide with phosphorothioate linkage
  modified_base 99: mod_base = OTHER; note = Nucleotide with phosphorothioate linkage
  modified_base 100: mod_base = OTHER; note = 2'-O-methyl modified nucleotide with phosphorothioate linkage
  modified_base 101: mod_base = OTHER; note = 2'-O-methyl modified nucleotide with phosphorothioate linkage
  modified_base 102: mod_base = OTHER; note = 2'-O-methyl modified nucleotide

SEQ ID NO: 28848 - RNA, 101 nt, synthetic construct; identical to SEQ ID NO: 28286
  source 1..101: mol_type = other RNA
  modified_base 1: mod_base = OTHER; note = 2'-O-methyl modified nucleotide with phosphorothioate linkage
  modified_base 2: mod_base = OTHER; note = 2'-O-methyl modified nucleotide with phosphorothioate linkage
  modified_base 3: mod_base = OTHER; note = 2'-O-methyl modified nucleotide with phosphorothioate linkage
  modified_base 98: mod_base = OTHER; note = Nucleotide with phosphorothioate linkage
  modified_base 99: mod_base = OTHER; note = 2'-O-methyl modified nucleotide with phosphorothioate linkage
  modified_base 100: mod_base = OTHER; note = 2'-O-methyl modified nucleotide with phosphorothioate linkage
  modified_base 101: mod_base = OTHER; note = 2'-O-methyl modified nucleotide

SEQ ID NO: 28849 - RNA, 100 nt, synthetic construct; identical to SEQ ID NO: 28287
  source 1..100: mol_type = other RNA
  modified_base 1: mod_base = OTHER; note = 2'-O-methyl modified nucleotide with phosphorothioate linkage
  modified_base 2: mod_base = OTHER; note = 2'-O-methyl modified nucleotide with phosphorothioate linkage
  modified_base 3: mod_base = OTHER; note = 2'-O-methyl modified nucleotide with phosphorothioate linkage
  modified_base 97: mod_base = OTHER; note = Nucleotide with phosphorothioate linkage
  modified_base 98: mod_base = OTHER; note = 2'-O-methyl modified nucleotide with phosphorothioate linkage
  modified_base 99: mod_base = OTHER; note = 2'-O-methyl modified nucleotide with phosphorothioate linkage
  modified_base 100: mod_base = OTHER; note = 2'-O-methyl modified nucleotide

SEQ ID NO: 28850 - RNA, 99 nt, synthetic construct; identical to SEQ ID NO: 28288
  source 1..99: mol_type = other RNA
  modified_base 1: mod_base = OTHER; note = 2'-O-methyl modified nucleotide with phosphorothioate linkage
  modified_base 2: mod_base = OTHER; note = 2'-O-methyl modified nucleotide with phosphorothioate linkage
  modified_base 3: mod_base = OTHER; note = 2'-O-methyl modified nucleotide with phosphorothioate linkage
  modified_base 96: mod_base = OTHER; note = Nucleotide with phosphorothioate linkage
  modified_base 97: mod_base = OTHER; note = 2'-O-methyl modified nucleotide with phosphorothioate linkage
  modified_base 98: mod_base = OTHER; note = 2'-O-methyl modified nucleotide with phosphorothioate linkage
  modified_base 99: mod_base = OTHER; note = 2'-O-methyl modified nucleotide

SEQ ID NO: 28851 - RNA, 98 nt, synthetic construct; identical to SEQ ID NO: 28289
  source 1..98: mol_type = other RNA
  modified_base 1: mod_base = OTHER; note = 2'-O-methyl modified nucleotide with phosphorothioate linkage
  modified_base 2: mod_base = OTHER; note = 2'-O-methyl modified nucleotide with phosphorothioate linkage
  modified_base 3: mod_base = OTHER; note = 2'-O-methyl modified nucleotide with phosphorothioate linkage
  modified_base 95: mod_base = OTHER; note = Nucleotide with phosphorothioate linkage
  modified_base 96: mod_base = OTHER; note = 2'-O-methyl modified nucleotide with phosphorothioate linkage
  modified_base 97: mod_base = OTHER; note = 2'-O-methyl modified nucleotide with phosphorothioate linkage
  modified_base 98: mod_base = OTHER; note = 2'-O-methyl modified nucleotide

SEQ ID NO: 28852 - RNA, 97 nt, synthetic construct; identical to SEQ ID NO: 28290
  source 1..97: mol_type = other RNA
  modified_base 1: mod_base = OTHER; note = 2'-O-methyl modified nucleotide with phosphorothioate linkage
  modified_base 2: mod_base = OTHER; note = 2'-O-methyl modified nucleotide with phosphorothioate linkage
  modified_base 3: mod_base = OTHER; note = 2'-O-methyl modified nucleotide with phosphorothioate linkage
  modified_base 94: mod_base = OTHER; note = Nucleotide with phosphorothioate linkage
  modified_base 95: mod_base = OTHER; note = 2'-O-methyl modified nucleotide with phosphorothioate linkage
  modified_base 96: mod_base = OTHER; note = 2'-O-methyl modified nucleotide with phosphorothioate linkage
  modified_base 97: mod_base = OTHER; note = 2'-O-methyl modified nucleotide

SEQ ID NO: 28853 - RNA, 96 nt, synthetic construct; identical to SEQ ID NO: 28291
  source 1..96: mol_type = other RNA
  modified_base 1: mod_base = OTHER; note = 2'-O-methyl modified nucleotide with phosphorothioate linkage
  modified_base 2: mod_base = OTHER; note = 2'-O-methyl modified nucleotide with phosphorothioate linkage
  modified_base 3: mod_base = OTHER; note = 2'-O-methyl modified nucleotide with phosphorothioate linkage
  modified_base 93: mod_base = OTHER; note = Nucleotide with phosphorothioate linkage
  modified_base 94: mod_base = OTHER; note = 2'-O-methyl modified nucleotide with phosphorothioate linkage
  modified_base 95: mod_base = OTHER; note = 2'-O-methyl modified nucleotide with phosphorothioate linkage
  modified_base 96: mod_base = OTHER; note = 2'-O-methyl modified nucleotide

SEQ ID NO: 28854 - RNA, 95 nt, synthetic construct; identical to SEQ ID NO: 28292
  source 1..95: mol_type = other RNA
  modified_base 1: mod_base = OTHER; note = 2'-O-methyl modified nucleotide with phosphorothioate linkage
  modified_base 2: mod_base = OTHER; note = 2'-O-methyl modified nucleotide with phosphorothioate linkage
  modified_base 3: mod_base = OTHER; note = 2'-O-methyl modified nucleotide with phosphorothioate linkage
  modified_base 92: mod_base = OTHER; note = Nucleotide with phosphorothioate linkage
  modified_base 93: mod_base = OTHER; note = 2'-O-methyl modified nucleotide with phosphorothioate linkage
  modified_base 94: mod_base = OTHER; note = 2'-O-methyl modified nucleotide with phosphorothioate linkage
  modified_base 95: mod_base = OTHER; note = 2'-O-methyl modified nucleotide

SEQ ID NO: 28855 - RNA, 94 nt, synthetic construct; identical to SEQ ID NO: 27171
  source 1..94: mol_type = other RNA
  modified_base 1: mod_base = OTHER; note = 2'-O-methyl modified nucleotide with phosphorothioate linkage
  modified_base 2: mod_base = OTHER; note = 2'-O-methyl modified nucleotide with phosphorothioate linkage
  modified_base 3: mod_base = OTHER; note = 2'-O-methyl modified nucleotide with phosphorothioate linkage
  modified_base 91: mod_base = OTHER; note = Nucleotide with phosphorothioate linkage
  modified_base 92: mod_base = OTHER; note = 2'-O-methyl modified nucleotide with phosphorothioate linkage
  modified_base 93: mod_base = OTHER; note = 2'-O-methyl modified nucleotide with phosphorothioate linkage
  modified_base 94: mod_base = OTHER; note = 2'-O-methyl modified nucleotide

SEQ ID NO: 28856 - RNA, 93 nt, synthetic construct; identical to SEQ ID NO: 27172
  source 1..93: mol_type = other RNA
  modified_base 1: mod_base = OTHER; note = 2'-O-methyl modified nucleotide with phosphorothioate linkage
  modified_base 2: mod_base = OTHER; note = 2'-O-methyl modified nucleotide with phosphorothioate linkage
  modified_base 3: mod_base = OTHER; note = 2'-O-methyl modified nucleotide with phosphorothioate linkage
  modified_base 90: mod_base = OTHER; note = Nucleotide with phosphorothioate linkage
  modified_base 91: mod_base = OTHER; note = 2'-O-methyl modified nucleotide with phosphorothioate linkage
  modified_base 92: mod_base = OTHER; note = 2'-O-methyl modified nucleotide with phosphorothioate linkage
  modified_base 93: mod_base = OTHER; note = 2'-O-methyl modified nucleotide

SEQ ID NO: 28857 - RNA, 92 nt, synthetic construct; identical to SEQ ID NO: 27173
  source 1..92: mol_type = other RNA
  modified_base 1: mod_base = OTHER; note = 2'-O-methyl modified nucleotide with phosphorothioate linkage
  modified_base 2: mod_base = OTHER; note = 2'-O-methyl modified nucleotide with phosphorothioate linkage
  modified_base 3: mod_base = OTHER; note = 2'-O-methyl modified nucleotide with phosphorothioate linkage
  modified_base 89: mod_base = OTHER; note = Nucleotide with phosphorothioate linkage
  modified_base 90: mod_base = OTHER; note = 2'-O-methyl modified nucleotide with phosphorothioate linkage
  modified_base 91: mod_base = OTHER; note = 2'-O-methyl modified nucleotide with phosphorothioate linkage
  modified_base 92: mod_base = OTHER; note = 2'-O-methyl modified nucleotide

SEQ ID NO: 28858 - RNA, 104 nt, synthetic construct; identical to SEQ ID NO: 28296
  source 1..104: mol_type = other RNA
  modified_base 1: mod_base = OTHER; note = 2'-O-methyl modified nucleotide with phosphorothioate linkage
  modified_base 2: mod_base = OTHER; note = 2'-O-methyl modified nucleotide with phosphorothioate linkage
  modified_base 3: mod_base = OTHER; note = 2'-O-methyl modified nucleotide with phosphorothioate linkage
  modified_base 101: mod_base = OTHER; note = Nucleotide with phosphorothioate linkage
  modified_base 102: mod_base = OTHER; note = 2'-O-methyl modified nucleotide with phosphorothioate linkage
  modified_base 103: mod_base = OTHER; note = 2'-O-methyl modified nucleotide with phosphorothioate linkage
  modified_base 104: mod_base = OTHER; note = 2'-O-methyl modified nucleotide

SEQ ID NO: 28859 - RNA, 103 nt, synthetic construct; identical to SEQ ID NO: 28297
  source 1..103: mol_type = other RNA
  modified_base 1: mod_base = OTHER; note = 2'-O-methyl modified nucleotide with phosphorothioate linkage
  modified_base 2: mod_base = OTHER; note = 2'-O-methyl modified nucleotide with phosphorothioate linkage
  modified_base 3: mod_base = OTHER; note = 2'-O-methyl modified nucleotide with phosphorothioate linkage
  modified_base 100: mod_base = OTHER; note = Nucleotide with phosphorothioate linkage
  modified_base 101: mod_base = OTHER; note = 2'-O-methyl modified nucleotide with phosphorothioate linkage
  modified_base 102: mod_base = OTHER; note = 2'-O-methyl modified nucleotide with phosphorothioate linkage
  modified_base 103: mod_base = OTHER; note = 2'-O-methyl modified nucleotide

SEQ ID NO: 28860 - RNA, 102 nt, synthetic construct; identical to SEQ ID NO: 28298
  source 1..102: mol_type = other RNA
  modified_base 1: mod_base = OTHER; note = 2'-O-methyl modified nucleotide with phosphorothioate linkage
  modified_base 2: mod_base = OTHER; note = 2'-O-methyl modified nucleotide with phosphorothioate linkage
  modified_base 3: mod_base = OTHER; note = 2'-O-methyl modified nucleotide with phosphorothioate linkage
  modified_base 99: mod_base = OTHER; note = Nucleotide with phosphorothioate linkage
  modified_base 100: mod_base = OTHER; note = 2'-O-methyl modified nucleotide with phosphorothioate linkage
  modified_base 101: mod_base = OTHER; note = 2'-O-methyl modified nucleotide with phosphorothioate linkage
  modified_base 102: mod_base = OTHER; note = 2'-O-methyl modified nucleotide

SEQ ID NO: 28861 - RNA, 101 nt, synthetic construct; identical to SEQ ID NO: 28299
  source 1..101: mol_type = other RNA
  modified_base 1: mod_base = OTHER; note = 2'-O-methyl modified nucleotide with phosphorothioate linkage
  modified_base 2: mod_base = OTHER; note = 2'-O-methyl modified nucleotide with phosphorothioate linkage
  modified_base 3: mod_base = OTHER; note = 2'-O-methyl modified nucleotide with phosphorothioate linkage
  modified_base 98: mod_base = OTHER; note = Nucleotide with phosphorothioate linkage
  modified_base 99: mod_base = OTHER; note = 2'-O-methyl modified nucleotide with phosphorothioate linkage
  modified_base 100: mod_base = OTHER; note = 2'-O-methyl modified nucleotide with phosphorothioate linkage
  modified_base 101: mod_base = OTHER; note = 2'-O-methyl modified nucleotide

SEQ ID NO: 28862 - RNA, 100 nt, synthetic construct; identical to SEQ ID NO: 28300
  source 1..100: mol_type = other RNA
  modified_base 1: mod_base = OTHER; note = 2'-O-methyl modified nucleotide with phosphorothioate linkage
  modified_base 2: mod_base = OTHER; note = 2'-O-methyl modified nucleotide with phosphorothioate linkage
  modified_base 3: mod_base = OTHER; note = 2'-O-methyl modified nucleotide with phosphorothioate linkage
  modified_base 97: mod_base = OTHER; note = Nucleotide with phosphorothioate linkage
  modified_base 98: mod_base = OTHER; note = 2'-O-methyl modified nucleotide with phosphorothioate linkage
  modified_base 99: mod_base = OTHER; note = 2'-O-methyl modified nucleotide with phosphorothioate linkage
  modified_base 100: mod_base = OTHER; note = 2'-O-methyl modified nucleotide

SEQ ID NO: 28863 - RNA, 99 nt, synthetic construct; identical to SEQ ID NO: 28301
  source 1..99: mol_type = other RNA
  modified_base 1: mod_base = OTHER; note = 2'-O-methyl modified nucleotide with phosphorothioate linkage
  modified_base 2: mod_base = OTHER; note = 2'-O-methyl modified nucleotide with phosphorothioate linkage
  modified_base 3: mod_base = OTHER; note = 2'-O-methyl modified nucleotide with phosphorothioate linkage
  modified_base 96: mod_base = OTHER; note = Nucleotide with phosphorothioate linkage
  modified_base 97: mod_base = OTHER; note = 2'-O-methyl modified nucleotide with phosphorothioate linkage
  modified_base 98: mod_base = OTHER; note = 2'-O-methyl modified nucleotide with phosphorothioate linkage
  modified_base 99: mod_base = OTHER; note = 2'-O-methyl modified nucleotide

SEQ ID NO: 28864 - RNA, 98 nt, synthetic construct; identical to SEQ ID NO: 28302
  source 1..98: mol_type = other RNA
  modified_base 1: mod_base = OTHER; note = 2'-O-methyl modified nucleotide with phosphorothioate linkage
  modified_base 2: mod_base = OTHER; note = 2'-O-methyl modified nucleotide with phosphorothioate linkage
  modified_base 3: mod_base = OTHER; note = 2'-O-methyl modified nucleotide with phosphorothioate linkage
  modified_base 95: mod_base = OTHER; note = Nucleotide with phosphorothioate linkage
  modified_base 96: mod_base = OTHER; note = 2'-O-methyl modified nucleotide with phosphorothioate linkage
  modified_base 97: mod_base = OTHER; note = 2'-O-methyl modified nucleotide with phosphorothioate linkage
  modified_base 98: mod_base = OTHER; note = 2'-O-methyl modified nucleotide

SEQ ID NO: 28865 - RNA, 97 nt, synthetic construct; identical to SEQ ID NO: 28303
  source 1..97: mol_type = other RNA
  modified_base 1: mod_base = OTHER; note = 2'-O-methyl modified nucleotide with phosphorothioate linkage
  modified_base 2: mod_base = OTHER; note = 2'-O-methyl modified nucleotide with phosphorothioate linkage
  modified_base 3: mod_base = OTHER; note = 2'-O-methyl modified nucleotide with phosphorothioate linkage
  modified_base 94: mod_base = OTHER; note = Nucleotide with phosphorothioate linkage
  modified_base 95: mod_base = OTHER; note = 2'-O-methyl modified nucleotide with phosphorothioate linkage
  modified_base 96: mod_base = OTHER; note = 2'-O-methyl modified nucleotide with phosphorothioate linkage
  modified_base 97: mod_base = OTHER; note = 2'-O-methyl modified nucleotide

SEQ ID NO: 28866 - RNA, 96 nt, synthetic construct; identical to SEQ ID NO: 28304
  source 1..96: mol_type = other RNA
  modified_base 1: mod_base = OTHER; note = 2'-O-methyl modified nucleotide with phosphorothioate linkage
  modified_base 2: mod_base = OTHER; note = 2'-O-methyl modified nucleotide with phosphorothioate linkage
  modified_base 3: mod_base = OTHER; note = 2'-O-methyl modified nucleotide with phosphorothioate linkage
  modified_base 93: mod_base = OTHER; note = Nucleotide with phosphorothioate linkage
  modified_base 94: mod_base = OTHER; note = 2'-O-methyl modified nucleotide with phosphorothioate linkage
  modified_base 95: mod_base = OTHER; note = 2'-O-methyl modified nucleotide with phosphorothioate linkage
  modified_base 96: mod_base = OTHER; note = 2'-O-methyl modified nucleotide

SEQ ID NO: 28867 - RNA, 95 nt, synthetic construct; identical to SEQ ID NO: 27174
  source 1..95: mol_type = other RNA
  modified_base 1: mod_base = OTHER; note = 2'-O-methyl modified nucleotide with phosphorothioate linkage
  modified_base 2: mod_base = OTHER; note = 2'-O-methyl modified nucleotide with phosphorothioate linkage
  modified_base 3: mod_base = OTHER; note = 2'-O-methyl modified nucleotide with phosphorothioate linkage
  modified_base 92: mod_base = OTHER; note = Nucleotide with phosphorothioate linkage
  modified_base 93: mod_base = OTHER; note = 2'-O-methyl modified nucleotide with phosphorothioate linkage
  modified_base 94: mod_base = OTHER; note = 2'-O-methyl modified nucleotide with phosphorothioate linkage
  modified_base 95: mod_base = OTHER; note = 2'-O-methyl modified nucleotide

SEQ ID NO: 28868 - RNA, 94 nt, synthetic construct; identical to SEQ ID NO: 27175
  source 1..94: mol_type = other RNA
  modified_base 1: mod_base = OTHER; note = 2'-O-methyl modified nucleotide with phosphorothioate linkage
  modified_base 2: mod_base = OTHER; note = 2'-O-methyl modified nucleotide with phosphorothioate linkage
  modified_base 3: mod_base = OTHER; note = 2'-O-methyl modified nucleotide with phosphorothioate linkage
  modified_base 91: mod_base = OTHER; note = Nucleotide with phosphorothioate linkage
  modified_base 92: mod_base = OTHER; note = 2'-O-methyl modified nucleotide with phosphorothioate linkage
  modified_base 93: mod_base = OTHER; note = 2'-O-methyl modified nucleotide with phosphorothioate linkage
  modified_base 94: mod_base = OTHER; note = 2'-O-methyl modified nucleotide

SEQ ID NO: 28869 - RNA, 93 nt, synthetic construct; identical to SEQ ID NO: 27176
  source 1..93: mol_type = other RNA
  modified_base 1: mod_base = OTHER; note = 2'-O-methyl modified nucleotide with phosphorothioate linkage
  modified_base 2: mod_base = OTHER; note = 2'-O-methyl modified nucleotide with phosphorothioate linkage
  modified_base 3: mod_base = OTHER; note = 2'-O-methyl modified nucleotide with phosphorothioate linkage
  modified_base 90: mod_base = OTHER; note = Nucleotide with phosphorothioate linkage
  modified_base 91: mod_base = OTHER; note = 2'-O-methyl modified nucleotide with phosphorothioate linkage
  modified_base 92: mod_base = OTHER; note = 2'-O-methyl modified nucleotide with phosphorothioate linkage
  modified_base 93: mod_base = OTHER; note = 2'-O-methyl modified nucleotide

SEQ ID NO: 28870 - RNA, 105 nt, synthetic construct; identical to SEQ ID NO: 28308
  source 1..105: mol_type = other RNA
  modified_base 1: mod_base = OTHER; note = 2'-O-methyl modified nucleotide with phosphorothioate linkage
  modified_base 2: mod_base = OTHER; note = 2'-O-methyl modified nucleotide with phosphorothioate linkage
  modified_base 3: mod_base = OTHER; note = 2'-O-methyl modified nucleotide with phosphorothioate linkage
  modified_base 102: mod_base = OTHER; note = Nucleotide with phosphorothioate linkage
  modified_base 103: mod_base = OTHER; note = 2'-O-methyl modified nucleotide with phosphorothioate linkage
  modified_base 104: mod_base = OTHER; note = 2'-O-methyl modified nucleotide with phosphorothioate linkage
  modified_base 105: mod_base = OTHER; note = 2'-O-methyl modified nucleotide

SEQ ID NO: 28871 - RNA, 104 nt, synthetic construct; identical to SEQ ID NO: 28309
  source 1..104: mol_type = other RNA
  modified_base 1: mod_base = OTHER; note = 2'-O-methyl modified nucleotide with phosphorothioate linkage
  modified_base 2: mod_base = OTHER; note = 2'-O-methyl modified nucleotide with phosphorothioate linkage
  modified_base 3: mod_base = OTHER; note = 2'-O-methyl modified nucleotide with phosphorothioate linkage
  modified_base 101: mod_base = OTHER; note = Nucleotide with phosphorothioate linkage
  modified_base 102: mod_base = OTHER; note = 2'-O-methyl modified nucleotide with phosphorothioate linkage
  modified_base 103: mod_base = OTHER; note = 2'-O-methyl modified nucleotide with phosphorothioate linkage
  modified_base 104: mod_base = OTHER; note = 2'-O-methyl modified nucleotide

SEQ ID NO: 28872 - RNA, 103 nt, synthetic construct; identical to SEQ ID NO: 28310
  source 1..103: mol_type = other RNA
  modified_base 1: mod_base = OTHER; note = 2'-O-methyl modified nucleotide with phosphorothioate linkage
  modified_base 2: mod_base = OTHER; note = 2'-O-methyl modified nucleotide with phosphorothioate linkage
  modified_base 3: mod_base = OTHER; note = 2'-O-methyl modified nucleotide with phosphorothioate linkage
  modified_base 100: mod_base = OTHER; note = Nucleotide with phosphorothioate linkage
  modified_base 101: mod_base = OTHER; note = 2'-O-methyl modified nucleotide with phosphorothioate linkage
  modified_base 102: mod_base = OTHER; note = 2'-O-methyl modified nucleotide with phosphorothioate linkage
  modified_base 103: mod_base = OTHER; note = 2'-O-methyl modified nucleotide

SEQ ID NO: 28873 - RNA, 102 nt, synthetic construct; identical to SEQ ID NO: 28311
  source 1..102: mol_type = other RNA
  modified_base 1: mod_base = OTHER; note = 2'-O-methyl modified nucleotide with phosphorothioate linkage
  modified_base 2: mod_base = OTHER; note = 2'-O-methyl modified nucleotide with phosphorothioate linkage
  modified_base 3: mod_base = OTHER; note = 2'-O-methyl modified nucleotide with phosphorothioate linkage
  modified_base 99: mod_base = OTHER; note = Nucleotide with phosphorothioate linkage
  modified_base 100: mod_base = OTHER; note = 2'-O-methyl modified nucleotide with phosphorothioate linkage
  modified_base 101: mod_base = OTHER; note = 2'-O-methyl modified nucleotide with phosphorothioate linkage
  modified_base 102: mod_base = OTHER; note = 2'-O-methyl modified nucleotide

SEQ ID NO: 28874 - RNA, 101 nt, synthetic construct; identical to SEQ ID NO: 28312
  source 1..101: mol_type = other RNA
  modified_base 1: mod_base = OTHER; note = 2'-O-methyl modified nucleotide with phosphorothioate linkage
  modified_base 2: mod_base = OTHER; note = 2'-O-methyl modified nucleotide with phosphorothioate linkage
  modified_base 3: mod_base = OTHER; note = 2'-O-methyl modified nucleotide with phosphorothioate linkage
  modified_base 98: mod_base = OTHER; note = Nucleotide with phosphorothioate linkage
  modified_base 99: mod_base = OTHER; note = 2'-O-methyl modified nucleotide with phosphorothioate linkage
  modified_base 100: mod_base = OTHER; note = 2'-O-methyl modified nucleotide with phosphorothioate linkage
  modified_base 101: mod_base = OTHER; note = 2'-O-methyl modified nucleotide

SEQ ID NO: 28875 - RNA, 100 nt, synthetic construct; identical to SEQ ID NO: 28313
  source 1..100: mol_type = other RNA
  modified_base 1: mod_base = OTHER; note = 2'-O-methyl modified nucleotide with phosphorothioate linkage
  modified_base 2: mod_base = OTHER; note = 2'-O-methyl modified nucleotide with phosphorothioate linkage
  modified_base 3: mod_base = OTHER; note = 2'-O-methyl modified nucleotide with phosphorothioate linkage
  modified_base 97: mod_base = OTHER; note = Nucleotide with phosphorothioate linkage
  modified_base 98: mod_base = OTHER; note = 2'-O-methyl modified nucleotide with phosphorothioate linkage
  modified_base 99: mod_base = OTHER; note = 2'-O-methyl modified nucleotide with phosphorothioate linkage
  modified_base 100: mod_base = OTHER; note = 2'-O-methyl modified nucleotide

SEQ ID NO: 28876 - RNA, 99 nt, synthetic construct; identical to SEQ ID NO: 28314
  source 1..99: mol_type = other RNA
  modified_base 1: mod_base = OTHER; note = 2'-O-methyl modified nucleotide with phosphorothioate linkage
  modified_base 2: mod_base = OTHER; note = 2'-O-methyl modified nucleotide with phosphorothioate linkage
  modified_base 3: mod_base = OTHER; note = 2'-O-methyl modified nucleotide with phosphorothioate linkage
  modified_base 96: mod_base = OTHER; note = Nucleotide with phosphorothioate linkage
  modified_base 97: mod_base = OTHER; note = 2'-O-methyl modified nucleotide with phosphorothioate linkage
  modified_base 98: mod_base = OTHER; note = 2'-O-methyl modified nucleotide with phosphorothioate linkage
  modified_base 99: mod_base = OTHER; note = 2'-O-methyl modified nucleotide

SEQ ID NO: 28877 - RNA, 98 nt, synthetic construct; identical to SEQ ID NO: 28315
  source 1..98: mol_type = other RNA
  modified_base 1: mod_base = OTHER; note = 2'-O-methyl modified nucleotide with phosphorothioate linkage
  modified_base 2: mod_base = OTHER; note = 2'-O-methyl modified nucleotide with phosphorothioate linkage
  modified_base 3: mod_base = OTHER; note = 2'-O-methyl modified nucleotide with phosphorothioate linkage
  modified_base 95: mod_base = OTHER; note = Nucleotide with phosphorothioate linkage
  modified_base 96: mod_base = OTHER; note = 2'-O-methyl modified nucleotide with phosphorothioate linkage
  modified_base 97: mod_base = OTHER; note = 2'-O-methyl modified nucleotide with phosphorothioate linkage
  modified_base 98: mod_base = OTHER; note = 2'-O-methyl modified nucleotide

SEQ ID NO: 28878 - RNA, 97 nt, synthetic construct; identical to SEQ ID NO: 28316
  source 1..97: mol_type = other RNA
  modified_base 1: mod_base = OTHER; note = 2'-O-methyl modified nucleotide with phosphorothioate linkage
  modified_base 2: mod_base = OTHER; note = 2'-O-methyl modified nucleotide with phosphorothioate linkage
  modified_base 3: mod_base = OTHER; note = 2'-O-methyl modified nucleotide with phosphorothioate linkage
  modified_base 94: mod_base = OTHER; note = Nucleotide with phosphorothioate linkage
  modified_base 95: mod_base = OTHER; note = 2'-O-methyl modified nucleotide with phosphorothioate linkage
  modified_base 96: mod_base = OTHER; note = 2'-O-methyl modified nucleotide with phosphorothioate linkage
  modified_base 97: mod_base = OTHER; note = 2'-O-methyl modified nucleotide

SEQ ID NO: 28879 - RNA, 96 nt, synthetic construct; identical to SEQ ID NO: 27133
  source 1..96: mol_type = other RNA
  modified_base 1: mod_base = OTHER; note = 2'-O-methyl modified nucleotide with phosphorothioate linkage
  modified_base 2: mod_base = OTHER; note = 2'-O-methyl modified nucleotide with phosphorothioate linkage
  modified_base 3: mod_base = OTHER; note = 2'-O-methyl modified nucleotide with phosphorothioate linkage
  modified_base 93: mod_base = OTHER; note = Nucleotide with phosphorothioate linkage
  modified_base 94: mod_base = OTHER; note = 2'-O-methyl modified nucleotide with phosphorothioate linkage
  modified_base 95: mod_base = OTHER; note = 2'-O-methyl modified nucleotide with phosphorothioate linkage
  modified_base 96: mod_base = OTHER; note = 2'-O-methyl modified nucleotide

SEQ ID NO: 28880 - RNA, 95 nt, synthetic construct; identical to SEQ ID NO: 27178
  source 1..95: mol_type = other RNA
  modified_base 1: mod_base = OTHER; note = 2'-O-methyl modified nucleotide with phosphorothioate linkage
  modified_base 2: mod_base = OTHER; note = 2'-O-methyl modified nucleotide with phosphorothioate linkage
  modified_base 3: mod_base = OTHER; note = 2'-O-methyl modified nucleotide with phosphorothioate linkage
  modified_base 92: mod_base = OTHER; note = Nucleotide with phosphorothioate linkage
  modified_base 93: mod_base = OTHER; note = 2'-O-methyl modified nucleotide with phosphorothioate linkage
  modified_base 94: mod_base = OTHER; note = 2'-O-methyl modified nucleotide with phosphorothioate linkage
  modified_base 95: mod_base = OTHER; note = 2'-O-methyl modified nucleotide

SEQ ID NO: 28881 - RNA, 94 nt, synthetic construct; identical to SEQ ID NO: 27179
  source 1..94: mol_type = other RNA
  modified_base 1: mod_base = OTHER; note = 2'-O-methyl modified nucleotide with phosphorothioate linkage
  modified_base 2: mod_base = OTHER; note = 2'-O-methyl modified nucleotide with phosphorothioate linkage
  modified_base 3: mod_base = OTHER; note = 2'-O-methyl modified nucleotide with phosphorothioate linkage
  modified_base 91: mod_base = OTHER; note = Nucleotide with phosphorothioate linkage
  modified_base 92: mod_base = OTHER; note = 2'-O-methyl modified nucleotide with phosphorothioate linkage
  modified_base 93: mod_base = OTHER; note = 2'-O-methyl modified nucleotide with phosphorothioate linkage
  modified_base 94: mod_base = OTHER; note = 2'-O-methyl modified nucleotide

SEQ ID NO: 28882 - RNA, 106 nt, synthetic construct; identical to SEQ ID NO: 28320
  source 1..106: mol_type = other RNA
  modified_base 1: mod_base = OTHER; note = 2'-O-methyl modified nucleotide with phosphorothioate linkage
  modified_base 2: mod_base = OTHER; note = 2'-O-methyl modified nucleotide with phosphorothioate linkage
  modified_base 3: mod_base = OTHER; note = 2'-O-methyl modified nucleotide with phosphorothioate linkage
  modified_base 103: mod_base = OTHER; note = Nucleotide with phosphorothioate linkage
  modified_base 104: mod_base = OTHER; note = 2'-O-methyl modified nucleotide with phosphorothioate linkage
  modified_base 105: mod_base = OTHER; note = 2'-O-methyl modified nucleotide with phosphorothioate linkage
  modified_base 106: mod_base = OTHER; note = 2'-O-methyl modified nucleotide

SEQ ID NO: 28883 - RNA, 105 nt, synthetic construct; identical to SEQ ID NO: 28321
  source 1..105: mol_type = other RNA
  modified_base 1: mod_base = OTHER; note = 2'-O-methyl modified nucleotide with phosphorothioate linkage
  modified_base 2: mod_base = OTHER; note = 2'-O-methyl modified nucleotide with phosphorothioate linkage
  modified_base 3: mod_base = OTHER; note = 2'-O-methyl modified nucleotide with phosphorothioate linkage
  modified_base 102: mod_base = OTHER; note = Nucleotide with phosphorothioate linkage
  modified_base 103: mod_base = OTHER; note = 2'-O-methyl modified nucleotide with phosphorothioate linkage
  modified_base 104: mod_base = OTHER; note = 2'-O-methyl modified nucleotide with phosphorothioate linkage
  modified_base 105: mod_base = OTHER; note = 2'-O-methyl modified nucleotide

SEQ ID NO: 28884 - RNA, 104 nt, synthetic construct; identical to SEQ ID NO: 28322
  source 1..104: mol_type = other RNA
  modified_base 1: mod_base = OTHER; note = 2'-O-methyl modified nucleotide with phosphorothioate linkage
  modified_base 2: mod_base = OTHER; note = 2'-O-methyl modified nucleotide with phosphorothioate linkage
  modified_base 3: mod_base = OTHER; note = 2'-O-methyl modified nucleotide with phosphorothioate linkage
  modified_base 101: mod_base = OTHER; note = Nucleotide with phosphorothioate linkage
  modified_base 102: mod_base = OTHER; note = 2'-O-methyl modified nucleotide with phosphorothioate linkage
  modified_base 103: mod_base = OTHER; note = 2'-O-methyl modified nucleotide with phosphorothioate linkage
  modified_base 104: mod_base = OTHER; note = 2'-O-methyl modified nucleotide

SEQ ID NO: 28885 - RNA, 103 nt, synthetic construct; identical to SEQ ID NO: 28323
  source 1..103: mol_type = other RNA
  modified_base 1: mod_base = OTHER; note = 2'-O-methyl modified nucleotide with phosphorothioate linkage
  modified_base 2: mod_base = OTHER; note = 2'-O-methyl modified nucleotide with phosphorothioate linkage
  modified_base 3: mod_base = OTHER; note = 2'-O-methyl modified nucleotide with phosphorothioate linkage
  modified_base 100: mod_base = OTHER; note = Nucleotide with phosphorothioate linkage
  modified_base 101: mod_base = OTHER; note = 2'-O-methyl modified nucleotide with phosphorothioate linkage
  modified_base 102: mod_base = OTHER; note = 2'-O-methyl modified nucleotide with phosphorothioate linkage
  modified_base 103: mod_base = OTHER; note = 2'-O-methyl modified nucleotide

SEQ ID NO: 28886 - RNA, 102 nt, synthetic construct; identical to SEQ ID NO: 28324
  source 1..102: mol_type = other RNA
  modified_base 1: mod_base = OTHER; note = 2'-O-methyl modified nucleotide with phosphorothioate linkage
  modified_base 2: mod_base = OTHER; note = 2'-O-methyl modified nucleotide with phosphorothioate linkage
  modified_base 3: mod_base = OTHER; note = 2'-O-methyl modified nucleotide with phosphorothioate linkage
  modified_base 99: mod_base = OTHER; note = Nucleotide with phosphorothioate linkage
  modified_base 100: mod_base = OTHER; note = 2'-O-methyl modified nucleotide with phosphorothioate linkage
  modified_base 101: mod_base = OTHER; note = 2'-O-methyl modified nucleotide with phosphorothioate linkage
  modified_base 102: mod_base = OTHER; note = 2'-O-methyl modified nucleotide

SEQ ID NO: 28887 - RNA, 101 nt, synthetic construct; identical to SEQ ID NO: 28325
  source 1..101: mol_type = other RNA
  modified_base 1: mod_base = OTHER; note = 2'-O-methyl modified nucleotide with phosphorothioate linkage
  modified_base 2: mod_base = OTHER; note = 2'-O-methyl modified nucleotide with phosphorothioate linkage
  modified_base 3: mod_base = OTHER; note = 2'-O-methyl modified nucleotide with phosphorothioate linkage
  modified_base 98: mod_base = OTHER; note = Nucleotide with phosphorothioate linkage
  modified_base 99: mod_base = OTHER; note = 2'-O-methyl modified nucleotide with phosphorothioate linkage
  modified_base 100: mod_base = OTHER; note = 2'-O-methyl modified nucleotide with phosphorothioate linkage
  modified_base 101: mod_base = OTHER; note = 2'-O-methyl modified nucleotide

SEQ ID NO: 28888 - RNA, 100 nt, synthetic construct; identical to SEQ ID NO: 28326
  source 1..100: mol_type = other RNA
  modified_base 1: mod_base = OTHER; note = 2'-O-methyl modified nucleotide with phosphorothioate linkage
  modified_base 2: mod_base = OTHER; note = 2'-O-methyl modified nucleotide with phosphorothioate linkage
  modified_base 3: mod_base = OTHER; note = 2'-O-methyl modified nucleotide with phosphorothioate linkage
  modified_base 97: mod_base = OTHER; note = Nucleotide with phosphorothioate linkage
  modified_base 98: mod_base = OTHER; note = 2'-O-methyl modified nucleotide with phosphorothioate linkage
  modified_base 99: mod_base = OTHER; note = 2'-O-methyl modified nucleotide with phosphorothioate linkage
  modified_base 100: mod_base = OTHER; note = 2'-O-methyl modified nucleotide

SEQ ID NO: 28889 - RNA, 99 nt, synthetic construct; identical to SEQ ID NO: 28327
  source 1..99: mol_type = other RNA
  modified_base 1: mod_base = OTHER; note = 2'-O-methyl modified nucleotide with phosphorothioate linkage
  modified_base 2: mod_base = OTHER; note = 2'-O-methyl modified nucleotide with phosphorothioate linkage
  modified_base 3: mod_base = OTHER; note = 2'-O-methyl modified nucleotide with phosphorothioate linkage
  modified_base 96: mod_base = OTHER; note = Nucleotide with phosphorothioate linkage
  modified_base 97: mod_base = OTHER; note = 2'-O-methyl modified nucleotide with phosphorothioate linkage
  modified_base 98: mod_base = OTHER; note = 2'-O-methyl modified nucleotide with phosphorothioate linkage
  modified_base 99: mod_base = OTHER; note = 2'-O-methyl modified nucleotide

SEQ ID NO: 28890 - RNA, 98 nt, synthetic construct; identical to SEQ ID NO: 28328
  source 1..98: mol_type = other RNA
  modified_base 1: mod_base = OTHER; note = 2'-O-methyl modified nucleotide with phosphorothioate linkage
  modified_base 2: mod_base = OTHER; note = 2'-O-methyl modified nucleotide with phosphorothioate linkage
  modified_base 3: mod_base = OTHER; note = 2'-O-methyl modified nucleotide with phosphorothioate linkage
  modified_base 95: mod_base = OTHER; note = Nucleotide with phosphorothioate linkage
  modified_base 96: mod_base = OTHER; note = 2'-O-methyl modified nucleotide with phosphorothioate linkage
  modified_base 97: mod_base = OTHER; note = 2'-O-methyl modified nucleotide with phosphorothioate linkage
  modified_base 98: mod_base = OTHER; note = 2'-O-methyl modified nucleotide

SEQ ID NO: 28891 - RNA, 97 nt, synthetic construct; identical to SEQ ID NO: 28329
  source 1..97: mol_type = other RNA
  modified_base 1: mod_base = OTHER; note = 2'-O-methyl modified nucleotide with phosphorothioate linkage
  modified_base 2: mod_base = OTHER; note = 2'-O-methyl modified nucleotide with phosphorothioate linkage
  modified_base 3: mod_base = OTHER; note = 2'-O-methyl modified nucleotide with phosphorothioate linkage
  modified_base 94: mod_base = OTHER; note = Nucleotide with phosphorothioate linkage
  modified_base 95: mod_base = OTHER; note = 2'-O-methyl modified nucleotide with phosphorothioate linkage
  modified_base 96: mod_base = OTHER; note = 2'-O-methyl modified nucleotide with phosphorothioate linkage
  modified_base 97: mod_base = OTHER; note = 2'-O-methyl modified nucleotide

SEQ ID NO: 28892 - RNA, 96 nt, synthetic construct; identical to SEQ ID NO: 28330
  source 1..96: mol_type = other RNA
  modified_base 1: mod_base = OTHER; note = 2'-O-methyl modified nucleotide with phosphorothioate linkage
  modified_base 2: mod_base = OTHER; note = 2'-O-methyl modified nucleotide with phosphorothioate linkage
  modified_base 3: mod_base = OTHER; note = 2'-O-methyl modified nucleotide with phosphorothioate linkage
  modified_base 93: mod_base = OTHER; note = Nucleotide with phosphorothioate linkage
  modified_base 94: mod_base = OTHER; note = 2'-O-methyl modified nucleotide with phosphorothioate linkage
  modified_base 95: mod_base = OTHER; note = 2'-O-methyl modified nucleotide with phosphorothioate linkage
  modified_base 96: mod_base = OTHER; note = 2'-O-methyl modified nucleotide

SEQ ID NO: 28893 - RNA, 95 nt, synthetic construct; identical to SEQ ID NO: 28331
  source 1..95: mol_type = other RNA
  modified_base 1: mod_base = OTHER; note = 2'-O-methyl modified nucleotide with phosphorothioate linkage
  modified_base 2: mod_base = OTHER; note = 2'-O-methyl modified nucleotide with phosphorothioate linkage
  modified_base 3: mod_base = OTHER; note = 2'-O-methyl modified nucleotide with phosphorothioate linkage
  modified_base 92: mod_base = OTHER; note = Nucleotide with phosphorothioate linkage
  modified_base 93: mod_base = OTHER; note = 2'-O-methyl modified nucleotide with phosphorothioate linkage
  modified_base 94: mod_base = OTHER; note = 2'-O-methyl modified nucleotide with phosphorothioate linkage
  modified_base 95: mod_base = OTHER; note = 2'-O-methyl modified nucleotide

SEQ ID NO: 28894 - RNA, 107 nt, synthetic construct; identical to SEQ ID NO: 28332
  source 1..107: mol_type = other RNA
  modified_base 1: mod_base = OTHER; note = 2'-O-methyl modified nucleotide with phosphorothioate linkage
  modified_base 2: mod_base = OTHER; note = 2'-O-methyl modified nucleotide with phosphorothioate linkage
  modified_base 3: mod_base = OTHER; note = 2'-O-methyl modified nucleotide with phosphorothioate linkage
  modified_base 104: mod_base = OTHER; note = Nucleotide with phosphorothioate linkage
  modified_base 105: mod_base = OTHER; note = 2'-O-methyl modified nucleotide with phosphorothioate linkage
  modified_base 106: mod_base = OTHER; note = 2'-O-methyl modified nucleotide with phosphorothioate linkage
  modified_base 107: mod_base = OTHER; note = 2'-O-methyl modified nucleotide

SEQ ID NO: 28895 - RNA, 106 nt, synthetic construct; identical to SEQ ID NO: 28333
  source 1..106: mol_type = other RNA
  modified_base 1: mod_base = OTHER; note = 2'-O-methyl modified nucleotide with phosphorothioate linkage
  modified_base 2: mod_base = OTHER; note = 2'-O-methyl modified nucleotide with phosphorothioate linkage
  modified_base 3: mod_base = OTHER; note = 2'-O-methyl modified nucleotide with phosphorothioate linkage
  modified_base 103: mod_base = OTHER; note = Nucleotide with phosphorothioate linkage
  modified_base 104: mod_base = OTHER; note = 2'-O-methyl modified nucleotide with phosphorothioate linkage
  modified_base 105: mod_base = OTHER; note = 2'-O-methyl modified nucleotide with phosphorothioate linkage
  modified_base 106: mod_base = OTHER; note = 2'-O-methyl modified nucleotide

SEQ ID NO: 28896 - RNA, 105 nt, synthetic construct; identical to SEQ ID NO: 28334
  source 1..105: mol_type = other RNA
  modified_base 1: mod_base = OTHER; note = 2'-O-methyl modified nucleotide with phosphorothioate linkage
  modified_base 2: mod_base = OTHER; note = 2'-O-methyl modified nucleotide with phosphorothioate linkage
  modified_base 3: mod_base = OTHER; note = 2'-O-methyl modified nucleotide with phosphorothioate linkage
  modified_base 102: mod_base = OTHER; note = Nucleotide with phosphorothioate linkage
  modified_base 103: mod_base = OTHER; note = 2'-O-methyl modified nucleotide with phosphorothioate linkage
  modified_base 104: mod_base = OTHER; note = 2'-O-methyl modified nucleotide with phosphorothioate linkage
  modified_base 105: mod_base = OTHER; note = 2'-O-methyl modified nucleotide

SEQ ID NO: 28897 - RNA, 104 nt, synthetic construct; identical to SEQ ID NO: 28335
  source 1..104: mol_type = other RNA
  modified_base 1: mod_base = OTHER; note = 2'-O-methyl modified nucleotide with phosphorothioate linkage
  modified_base 2: mod_base = OTHER; note = 2'-O-methyl modified nucleotide with phosphorothioate linkage
  modified_base 3: mod_base = OTHER; note = 2'-O-methyl modified nucleotide with phosphorothioate linkage
  modified_base 101: mod_base = OTHER; note = Nucleotide with phosphorothioate linkage
  modified_base 102: mod_base = OTHER; note = 2'-O-methyl modified nucleotide with phosphorothioate linkage
  modified_base 103: mod_base = OTHER; note = 2'-O-methyl modified nucleotide with phosphorothioate linkage
  modified_base 104: mod_base = OTHER; note = 2'-O-methyl modified nucleotide

SEQ ID NO: 28898 - RNA, 103 nt, synthetic construct; identical to SEQ ID NO: 28336
  source 1..103: mol_type = other RNA
  modified_base 1: mod_base = OTHER; note = 2'-O-methyl modified nucleotide with phosphorothioate linkage
  modified_base 2: mod_base = OTHER; note = 2'-O-methyl modified nucleotide with phosphorothioate linkage
  modified_base 3: mod_base = OTHER; note = 2'-O-methyl modified nucleotide with phosphorothioate linkage
  modified_base 100: mod_base = OTHER; note = Nucleotide with phosphorothioate linkage
  modified_base 101: mod_base = OTHER; note = 2'-O-methyl modified nucleotide with phosphorothioate linkage
  modified_base 102: mod_base = OTHER; note = 2'-O-methyl modified nucleotide with phosphorothioate linkage
  modified_base 103: mod_base = OTHER; note = 2'-O-methyl modified nucleotide

SEQ ID NO: 28899 - RNA, 102 nt, synthetic construct; identical to SEQ ID NO: 28337
  source 1..102: mol_type = other RNA
  modified_base 1: mod_base = OTHER; note = 2'-O-methyl modified nucleotide with phosphorothioate linkage
  modified_base 2: mod_base = OTHER; note = 2'-O-methyl modified nucleotide with phosphorothioate linkage
  modified_base 3: mod_base = OTHER; note = 2'-O-methyl modified nucleotide with phosphorothioate linkage
  modified_base 99: mod_base = OTHER; note = Nucleotide with phosphorothioate linkage
  modified_base 100: mod_base = OTHER; note = 2'-O-methyl modified nucleotide with phosphorothioate linkage
  modified_base 101: mod_base = OTHER; note = 2'-O-methyl modified nucleotide with phosphorothioate linkage
  modified_base 102: mod_base = OTHER; note = 2'-O-methyl modified nucleotide

SEQ ID NO: 28900 - RNA, 101 nt, synthetic construct; identical to SEQ ID NO: 28338
  source 1..101: mol_type = other RNA
  modified_base 1: mod_base = OTHER; note = 2'-O-methyl modified nucleotide with phosphorothioate linkage
  modified_base 2: mod_base = OTHER; note = 2'-O-methyl modified nucleotide with phosphorothioate linkage
  modified_base 3: mod_base = OTHER; note = 2'-O-methyl modified nucleotide with phosphorothioate linkage
  modified_base 98: mod_base = OTHER; note = Nucleotide with phosphorothioate linkage
  modified_base 99: mod_base = OTHER; note = 2'-O-methyl modified nucleotide with phosphorothioate linkage
  modified_base 100: mod_base = OTHER; note = 2'-O-methyl modified nucleotide with phosphorothioate linkage
  modified_base 101: mod_base = OTHER; note = 2'-O-methyl modified nucleotide

SEQ ID NO: 28901 - RNA, 100 nt, synthetic construct; identical to SEQ ID NO: 28339
  source 1..100: mol_type = other RNA
  modified_base 1: mod_base = OTHER; note = 2'-O-methyl modified nucleotide with phosphorothioate linkage
  modified_base 2: mod_base = OTHER; note = 2'-O-methyl modified nucleotide with phosphorothioate linkage
  modified_base 3: mod_base = OTHER; note = 2'-O-methyl modified nucleotide with phosphorothioate linkage
  modified_base 97: mod_base = OTHER; note = Nucleotide with phosphorothioate linkage
  modified_base 98: mod_base = OTHER; note = 2'-O-methyl modified nucleotide with phosphorothioate linkage
  modified_base 99: mod_base = OTHER; note = 2'-O-methyl modified nucleotide with phosphorothioate linkage
  modified_base 100: mod_base = OTHER; note = 2'-O-methyl modified nucleotide

SEQ ID NO: 28902 - RNA, 99 nt, synthetic construct; identical to SEQ ID NO: 28340
  source 1..99: mol_type = other RNA
  modified_base 1: mod_base = OTHER; note = 2'-O-methyl modified nucleotide with phosphorothioate linkage
  modified_base 2: mod_base = OTHER; note = 2'-O-methyl modified nucleotide with phosphorothioate linkage
  modified_base 3: mod_base = OTHER; note = 2'-O-methyl modified nucleotide with phosphorothioate linkage
  modified_base 96: mod_base = OTHER; note = Nucleotide with phosphorothioate linkage
  modified_base 97: mod_base = OTHER; note = 2'-O-methyl modified nucleotide with phosphorothioate linkage
  modified_base 98: mod_base = OTHER; note = 2'-O-methyl modified nucleotide with phosphorothioate linkage
  modified_base 99: mod_base = OTHER; note = 2'-O-methyl modified nucleotide

SEQ ID NO: 28903 - RNA, 98 nt, synthetic construct; identical to SEQ ID NO: 27180
  source 1..98: mol_type = other RNA
  modified_base 1: mod_base = OTHER; note = 2'-O-methyl modified nucleotide with phosphorothioate linkage
  modified_base 2: mod_base = OTHER; note = 2'-O-methyl modified nucleotide with phosphorothioate linkage
  modified_base 3: mod_base = OTHER; note = 2'-O-methyl modified nucleotide with phosphorothioate linkage
  modified_base 95: mod_base = OTHER; note = Nucleotide with phosphorothioate linkage
  modified_base 96: mod_base = OTHER; note = 2'-O-methyl modified nucleotide with phosphorothioate linkage
  modified_base 97: mod_base = OTHER; note = 2'-O-methyl modified nucleotide with phosphorothioate linkage
  modified_base 98: mod_base = OTHER; note = 2'-O-methyl modified nucleotide

SEQ ID NO: 28904 - RNA, 97 nt, synthetic construct; identical to SEQ ID NO: 28342
  source 1..97: mol_type = other RNA
  modified_base 1: mod_base = OTHER; note = 2'-O-methyl modified nucleotide with phosphorothioate linkage
  modified_base 2: mod_base = OTHER; note = 2'-O-methyl modified nucleotide with phosphorothioate linkage
  modified_base 3: mod_base = OTHER; note = 2'-O-methyl modified nucleotide with phosphorothioate linkage
  modified_base 94: mod_base = OTHER; note = Nucleotide with phosphorothioate linkage
  modified_base 95: mod_base = OTHER; note = 2'-O-methyl modified nucleotide with phosphorothioate linkage
  modified_base 96: mod_base = OTHER; note = 2'-O-methyl modified nucleotide with phosphorothioate linkage
  modified_base 97: mod_base = OTHER; note = 2'-O-methyl modified nucleotide

SEQ ID NO: 28905 - RNA, 96 nt, synthetic construct; identical to SEQ ID NO: 28343
  source 1..96: mol_type = other RNA
  modified_base 1: mod_base = OTHER; note = 2'-O-methyl modified nucleotide with phosphorothioate linkage
  modified_base 2: mod_base = OTHER; note = 2'-O-methyl modified nucleotide with phosphorothioate linkage
  modified_base 3: mod_base = OTHER; note = 2'-O-methyl modified nucleotide with phosphorothioate linkage
  modified_base 93: mod_base = OTHER; note = Nucleotide with phosphorothioate linkage
  modified_base 94: mod_base = OTHER; note = 2'-O-methyl modified nucleotide with phosphorothioate linkage
  modified_base 95: mod_base = OTHER; note = 2'-O-methyl modified nucleotide with phosphorothioate linkage
  modified_base 96: mod_base = OTHER; note = 2'-O-methyl modified nucleotide

SEQ ID NO: 28906 - RNA, 108 nt, synthetic construct; identical to SEQ ID NO: 28344
  source 1..108: mol_type = other RNA
  modified_base 1: mod_base = OTHER; note = 2'-O-methyl modified nucleotide with phosphorothioate linkage
  modified_base 2: mod_base = OTHER; note = 2'-O-methyl modified nucleotide with phosphorothioate linkage
  modified_base 3: mod_base = OTHER; note = 2'-O-methyl modified nucleotide with phosphorothioate linkage
  modified_base 105: mod_base = OTHER; note = Nucleotide with phosphorothioate linkage
  modified_base 106: mod_base = OTHER; note = 2'-O-methyl modified nucleotide with phosphorothioate linkage
  modified_base 107: mod_base = OTHER; note = 2'-O-methyl modified nucleotide with phosphorothioate linkage
  modified_base 108: mod_base = OTHER; note = 2'-O-methyl modified nucleotide

SEQ ID NO: 28907 - RNA, 107 nt, synthetic construct; identical to SEQ ID NO: 28345
  source 1..107: mol_type = other RNA
  modified_base 1: mod_base = OTHER; note = 2'-O-methyl modified nucleotide with phosphorothioate linkage
  modified_base 2: mod_base = OTHER; note = 2'-O-methyl modified nucleotide with phosphorothioate linkage
  modified_base 3: mod_base = OTHER; note = 2'-O-methyl modified nucleotide with phosphorothioate linkage
  modified_base 104: mod_base = OTHER; note = Nucleotide with phosphorothioate linkage
  modified_base 105: mod_base = OTHER; note = 2'-O-methyl modified nucleotide with phosphorothioate linkage
  modified_base 106: mod_base = OTHER; note = 2'-O-methyl modified nucleotide with phosphorothioate linkage
  modified_base 107: mod_base = OTHER; note = 2'-O-methyl modified nucleotide

SEQ ID NO: 28908 - RNA, 106 nt, synthetic construct; identical to SEQ ID NO: 28346
  source 1..106: mol_type = other RNA
  modified_base 1: mod_base = OTHER; note = 2'-O-methyl modified nucleotide with phosphorothioate linkage
  modified_base 2: mod_base = OTHER; note = 2'-O-methyl modified nucleotide with phosphorothioate linkage
  modified_base 3: mod_base = OTHER; note = 2'-O-methyl modified nucleotide with phosphorothioate linkage
  modified_base 103: mod_base = OTHER; note = Nucleotide with phosphorothioate linkage
  modified_base 104: mod_base = OTHER; note = 2'-O-methyl modified nucleotide with phosphorothioate linkage
  modified_base 105: mod_base = OTHER; note = 2'-O-methyl modified nucleotide with phosphorothioate linkage
  modified_base 106: mod_base = OTHER; note = 2'-O-methyl modified nucleotide

SEQ ID NO: 28909 - RNA, 105 nt, synthetic construct; identical to SEQ ID NO: 28347
  source 1..105: mol_type = other RNA
  modified_base 1: mod_base = OTHER; note = 2'-O-methyl modified nucleotide with phosphorothioate linkage
  modified_base 2: mod_base = OTHER; note = 2'-O-methyl modified nucleotide with phosphorothioate linkage
  modified_base 3: mod_base = OTHER; note = 2'-O-methyl modified nucleotide with phosphorothioate linkage
  modified_base 102: mod_base = OTHER; note = Nucleotide with phosphorothioate linkage
  modified_base 103: mod_base = OTHER; note = 2'-O-methyl modified nucleotide with phosphorothioate linkage
  modified_base 104: mod_base = OTHER; note = 2'-O-methyl modified nucleotide with phosphorothioate linkage
  modified_base 105: mod_base = OTHER; note = 2'-O-methyl modified nucleotide

SEQ ID NO: 28910 - RNA, 104 nt, synthetic construct; identical to SEQ ID NO: 28348
  source 1..104: mol_type = other RNA
  modified_base 1: mod_base = OTHER; note = 2'-O-methyl modified nucleotide with phosphorothioate linkage
  modified_base 2: mod_base = OTHER; note = 2'-O-methyl modified nucleotide with phosphorothioate linkage
  modified_base 3: mod_base = OTHER; note = 2'-O-methyl modified nucleotide with phosphorothioate linkage
  modified_base 101: mod_base = OTHER; note = Nucleotide with phosphorothioate linkage
  modified_base 102: mod_base = OTHER; note = 2'-O-methyl modified nucleotide with phosphorothioate linkage
  modified_base 103: mod_base = OTHER; note = 2'-O-methyl modified nucleotide with phosphorothioate linkage
  modified_base 104: mod_base = OTHER; note = 2'-O-methyl modified nucleotide

SEQ ID NO: 28911 - RNA, 103 nt, synthetic construct; identical to SEQ ID NO: 28349
  source 1..103: mol_type = other RNA
  modified_base 1: mod_base = OTHER; note = 2'-O-methyl modified nucleotide with phosphorothioate linkage
  modified_base 2: mod_base = OTHER; note = 2'-O-methyl modified nucleotide with phosphorothioate linkage
  modified_base 3: mod_base = OTHER; note = 2'-O-methyl modified nucleotide with phosphorothioate linkage
  modified_base 100: mod_base = OTHER; note = Nucleotide with phosphorothioate linkage
  modified_base 101: mod_base = OTHER; note = 2'-O-methyl modified nucleotide with phosphorothioate linkage
  modified_base 102: mod_base = OTHER; note = 2'-O-methyl modified nucleotide with phosphorothioate linkage
  modified_base 103: mod_base = OTHER; note = 2'-O-methyl modified nucleotide

SEQ ID NO: 28912 - RNA, 102 nt, synthetic construct; identical to SEQ ID NO: 28350
  source 1..102: mol_type = other RNA
  modified_base 1: mod_base = OTHER; note = 2'-O-methyl modified nucleotide with phosphorothioate linkage
  modified_base 2: mod_base = OTHER; note = 2'-O-methyl modified nucleotide with phosphorothioate linkage
  modified_base 3: mod_base = OTHER; note = 2'-O-methyl modified nucleotide with phosphorothioate linkage
  modified_base 99: mod_base = OTHER; note = Nucleotide with phosphorothioate linkage
  modified_base 100: mod_base = OTHER; note = 2'-O-methyl modified nucleotide with phosphorothioate linkage
  modified_base 101: mod_base = OTHER; note = 2'-O-methyl modified nucleotide with phosphorothioate linkage
  modified_base 102: mod_base = OTHER; note = 2'-O-methyl modified nucleotide

SEQ ID NO: 28913 - RNA, 101 nt, synthetic construct; identical to SEQ ID NO: 28351
  source 1..101: mol_type = other RNA
  modified_base 1: mod_base = OTHER; note = 2'-O-methyl modified nucleotide with phosphorothioate linkage
  modified_base 2: mod_base = OTHER; note = 2'-O-methyl modified nucleotide with phosphorothioate linkage
  modified_base 3: mod_base = OTHER; note = 2'-O-methyl modified nucleotide with phosphorothioate linkage
  modified_base 98: mod_base = OTHER; note = Nucleotide with phosphorothioate linkage
  modified_base 99: mod_base = OTHER; note = 2'-O-methyl modified nucleotide with phosphorothioate linkage
  modified_base 100: mod_base = OTHER; note = 2'-O-methyl modified nucleotide with phosphorothioate linkage
  modified_base 101: mod_base = OTHER; note = 2'-O-methyl modified nucleotide

SEQ ID NO: 28914 - RNA, 100 nt, synthetic construct; identical to SEQ ID NO: 28352
  source 1..100: mol_type = other RNA
  modified_base 1: mod_base = OTHER; note = 2'-O-methyl modified nucleotide with phosphorothioate linkage
  modified_base 2: mod_base = OTHER; note = 2'-O-methyl modified nucleotide with phosphorothioate linkage
  modified_base 3: mod_base = OTHER; note = 2'-O-methyl modified nucleotide with phosphorothioate linkage
  modified_base 97: mod_base = OTHER; note = Nucleotide with phosphorothioate linkage
  modified_base 98: mod_base = OTHER; note = 2'-O-methyl modified nucleotide with phosphorothioate linkage
  modified_base 99: mod_base = OTHER; note = 2'-O-methyl modified nucleotide with phosphorothioate linkage
  modified_base 100: mod_base = OTHER; note = 2'-O-methyl modified nucleotide

SEQ ID NO: 28915 - RNA, 99 nt, synthetic construct; identical to SEQ ID NO: 28353
  source 1..99: mol_type = other RNA
  modified_base 1: mod_base = OTHER; note = 2'-O-methyl modified nucleotide with phosphorothioate linkage
  modified_base 2: mod_base = OTHER; note = 2'-O-methyl modified nucleotide with phosphorothioate linkage
  modified_base 3: mod_base = OTHER; note = 2'-O-methyl modified nucleotide with phosphorothioate linkage
  modified_base 96: mod_base = OTHER; note = Nucleotide with phosphorothioate linkage
  modified_base 97: mod_base = OTHER; note = 2'-O-methyl modified nucleotide with phosphorothioate linkage
  modified_base 98: mod_base = OTHER; note = 2'-O-methyl modified nucleotide with phosphorothioate linkage
  modified_base 99: mod_base = OTHER; note = 2'-O-methyl modified nucleotide

SEQ ID NO: 28916 - RNA, 98 nt, synthetic construct; identical to SEQ ID NO: 28354
  source 1..98: mol_type = other RNA
  modified_base 1: mod_base = OTHER; note = 2'-O-methyl modified nucleotide with phosphorothioate linkage
  modified_base 2: mod_base = OTHER; note = 2'-O-methyl modified nucleotide with phosphorothioate linkage
  modified_base 3: mod_base = OTHER; note = 2'-O-methyl modified nucleotide with phosphorothioate linkage
  modified_base 95: mod_base = OTHER; note = Nucleotide with phosphorothioate linkage
  modified_base 96: mod_base = OTHER; note = 2'-O-methyl modified nucleotide with phosphorothioate linkage
  modified_base 97: mod_base = OTHER; note = 2'-O-methyl modified nucleotide with phosphorothioate linkage
  modified_base 98: mod_base = OTHER; note = 2'-O-methyl modified nucleotide

SEQ ID NO: 28917 - RNA, 97 nt, synthetic construct; identical to SEQ ID NO: 28355
  source 1..97: mol_type = other RNA
  modified_base 1: mod_base = OTHER; note = 2'-O-methyl modified nucleotide with phosphorothioate linkage
  modified_base 2: mod_base = OTHER; note = 2'-O-methyl modified nucleotide with phosphorothioate linkage
  modified_base 3: mod_base = OTHER; note = 2'-O-methyl modified nucleotide with phosphorothioate linkage
  modified_base 94: mod_base = OTHER; note = Nucleotide with phosphorothioate linkage
  modified_base 95: mod_base = OTHER; note = 2'-O-methyl modified nucleotide with phosphorothioate linkage
  modified_base 96: mod_base = OTHER; note = 2'-O-methyl modified nucleotide with phosphorothioate linkage
  modified_base 97: mod_base = OTHER; note = 2'-O-methyl modified nucleotide

SEQ ID NO: 28918 - RNA, 109 nt, synthetic construct; identical to SEQ ID NO: 28356
  source 1..109: mol_type = other RNA
  modified_base 1: mod_base = OTHER; note = 2'-O-methyl modified nucleotide with phosphorothioate linkage
  modified_base 2: mod_base = OTHER; note = 2'-O-methyl modified nucleotide with phosphorothioate linkage
  modified_base 3: mod_base = OTHER; note = 2'-O-methyl modified nucleotide with phosphorothioate linkage
  modified_base 106: mod_base = OTHER; note = Nucleotide with phosphorothioate linkage
  modified_base 107: mod_base = OTHER; note = 2'-O-methyl modified nucleotide with phosphorothioate linkage
  modified_base 108: mod_base = OTHER; note = 2'-O-methyl modified nucleotide with phosphorothioate linkage
  modified_base 109: mod_base = OTHER; note = 2'-O-methyl modified nucleotide

SEQ ID NO: 28919 - RNA, 108 nt, synthetic construct; identical to SEQ ID NO: 28357
  source 1..108: mol_type = other RNA
  modified_base 1: mod_base = OTHER; note = 2'-O-methyl modified nucleotide with phosphorothioate linkage
  modified_base 2: mod_base = OTHER; note = 2'-O-methyl modified nucleotide with phosphorothioate linkage
  modified_base 3: mod_base = OTHER; note = 2'-O-methyl modified nucleotide with phosphorothioate linkage
  modified_base 105: mod_base = OTHER; note = Nucleotide with phosphorothioate linkage
  modified_base 106: mod_base = OTHER; note = 2'-O-methyl modified nucleotide with phosphorothioate linkage
  modified_base 107: mod_base = OTHER; note = 2'-O-methyl modified nucleotide with phosphorothioate linkage
  modified_base 108: mod_base = OTHER; note = 2'-O-methyl modified nucleotide

SEQ ID NO: 28920 - RNA, 107 nt, synthetic construct; identical to SEQ ID NO: 28358
  source 1..107: mol_type = other RNA
  modified_base 1: mod_base = OTHER; note = 2'-O-methyl modified nucleotide with phosphorothioate linkage
  modified_base 2: mod_base = OTHER; note = 2'-O-methyl modified nucleotide with phosphorothioate linkage
  modified_base 3: mod_base = OTHER; note = 2'-O-methyl modified nucleotide with phosphorothioate linkage
  modified_base 104: mod_base = OTHER; note = Nucleotide with phosphorothioate linkage
  modified_base 105: mod_base = OTHER; note = 2'-O-methyl modified nucleotide with phosphorothioate linkage
  modified_base 106: mod_base = OTHER; note = 2'-O-methyl modified nucleotide with phosphorothioate linkage
  modified_base 107: mod_base = OTHER; note = 2'-O-methyl modified nucleotide

SEQ ID NO: 28921 - RNA, 106 nt, synthetic construct; identical to SEQ ID NO: 28359
  source 1..106: mol_type = other RNA
  modified_base 1: mod_base = OTHER; note = 2'-O-methyl modified nucleotide with phosphorothioate linkage
  modified_base 2: mod_base = OTHER; note = 2'-O-methyl modified nucleotide with phosphorothioate linkage
  modified_base 3: mod_base = OTHER; note = 2'-O-methyl modified nucleotide with phosphorothioate linkage
  modified_base 103: mod_base = OTHER; note = Nucleotide with phosphorothioate linkage
  modified_base 104: mod_base = OTHER; note = 2'-O-methyl modified nucleotide with phosphorothioate linkage
  modified_base 105: mod_base = OTHER; note = 2'-O-methyl modified nucleotide with phosphorothioate linkage
  modified_base 106: mod_base = OTHER; note = 2'-O-methyl modified nucleotide

SEQ ID NO: 28922 - RNA, 105 nt, synthetic construct; identical to SEQ ID NO: 28360
  source 1..105: mol_type = other RNA
  modified_base 1: mod_base = OTHER; note = 2'-O-methyl modified nucleotide with phosphorothioate linkage
  modified_base 2: mod_base = OTHER; note = 2'-O-methyl modified nucleotide with phosphorothioate linkage
  modified_base 3: mod_base = OTHER; note = 2'-O-methyl modified nucleotide with phosphorothioate linkage
  modified_base 102: mod_base = OTHER; note = Nucleotide with phosphorothioate linkage
  modified_base 103: mod_base = OTHER; note = 2'-O-methyl modified nucleotide with phosphorothioate linkage
  modified_base 104: mod_base = OTHER; note = 2'-O-methyl modified nucleotide with phosphorothioate linkage
  modified_base 105: mod_base = OTHER; note = 2'-O-methyl modified nucleotide

SEQ ID NO: 28923 - RNA, 104 nt, synthetic construct; identical to SEQ ID NO: 28361
  source 1..104: mol_type = other RNA
  modified_base 1: mod_base = OTHER; note = 2'-O-methyl modified nucleotide with phosphorothioate linkage
  modified_base 2: mod_base = OTHER; note = 2'-O-methyl modified nucleotide with phosphorothioate linkage
  modified_base 3: mod_base = OTHER; note = 2'-O-methyl modified nucleotide with phosphorothioate linkage
  modified_base 101: mod_base = OTHER; note = Nucleotide with phosphorothioate linkage
  modified_base 102: mod_base = OTHER; note = 2'-O-methyl modified nucleotide with phosphorothioate linkage
  modified_base 103: mod_base = OTHER; note = 2'-O-methyl modified nucleotide with phosphorothioate linkage
  modified_base 104: mod_base = OTHER; note = 2'-O-methyl modified nucleotide

SEQ ID NO: 28924 - RNA, 103 nt, synthetic construct; identical to SEQ ID NO: 28362
  source 1..103: mol_type = other RNA
  modified_base 1: mod_base = OTHER; note = 2'-O-methyl modified nucleotide with phosphorothioate linkage
  modified_base 2: mod_base = OTHER; note = 2'-O-methyl modified nucleotide with phosphorothioate linkage
  modified_base 3: mod_base = OTHER; note = 2'-O-methyl modified nucleotide with phosphorothioate linkage
  modified_base 100: mod_base = OTHER; note = Nucleotide with phosphorothioate linkage
  modified_base 101: mod_base = OTHER; note = 2'-O-methyl modified nucleotide with phosphorothioate linkage
  modified_base 102: mod_base = OTHER; note = 2'-O-methyl modified nucleotide with phosphorothioate linkage
  modified_base 103: mod_base = OTHER; note = 2'-O-methyl modified nucleotide

SEQ ID NO: 28925 - RNA, 102 nt, synthetic construct; identical to SEQ ID NO: 28363
  source 1..102: mol_type = other RNA
  modified_base 1: mod_base = OTHER; note = 2'-O-methyl modified nucleotide with phosphorothioate linkage
  modified_base 2: mod_base = OTHER; note = 2'-O-methyl modified nucleotide with phosphorothioate linkage
  modified_base 3: mod_base = OTHER; note = 2'-O-methyl modified nucleotide with phosphorothioate linkage
  modified_base 99: mod_base = OTHER; note = Nucleotide with phosphorothioate linkage
  modified_base 100: mod_base = OTHER; note = 2'-O-methyl modified nucleotide with phosphorothioate linkage
  modified_base 101: mod_base = OTHER; note = 2'-O-methyl modified nucleotide with phosphorothioate linkage
  modified_base 102: mod_base = OTHER; note = 2'-O-methyl modified nucleotide

SEQ ID NO: 28926 - RNA, 101 nt, synthetic construct; identical to SEQ ID NO: 27181
  source 1..101: mol_type = other RNA
  modified_base 1: mod_base = OTHER; note = 2'-O-methyl modified nucleotide with phosphorothioate linkage
  modified_base 2: mod_base = OTHER; note = 2'-O-methyl modified nucleotide with phosphorothioate linkage
  modified_base 3: mod_base = OTHER; note = 2'-O-methyl modified nucleotide with phosphorothioate linkage
  modified_base 98: mod_base = OTHER; note = Nucleotide with phosphorothioate linkage
  modified_base 99: mod_base = OTHER; note = 2'-O-methyl modified nucleotide with phosphorothioate linkage
  modified_base 100: mod_base = OTHER; note = 2'-O-methyl modified nucleotide with phosphorothioate linkage
  modified_base 101: mod_base = OTHER; note = 2'-O-methyl modified nucleotide

SEQ ID NO: 28927 - RNA, 100 nt, synthetic construct; identical to SEQ ID NO: 27182
  source 1..100: mol_type = other RNA
  modified_base 1: mod_base = OTHER; note = 2'-O-methyl modified nucleotide with phosphorothioate linkage
  modified_base 2: mod_base = OTHER; note = 2'-O-methyl modified nucleotide with phosphorothioate linkage
  modified_base 3: mod_base = OTHER; note = 2'-O-methyl modified nucleotide with phosphorothioate linkage
  modified_base 97: mod_base = OTHER; note = Nucleotide with phosphorothioate linkage
  modified_base 98: mod_base = OTHER; note = 2'-O-methyl modified nucleotide with phosphorothioate linkage
  modified_base 99: mod_base = OTHER; note = 2'-O-methyl modified nucleotide with phosphorothioate linkage
  modified_base 100: mod_base = OTHER; note = 2'-O-methyl modified nucleotide

SEQ ID NO: 28928 - RNA, 99 nt, synthetic construct; identical to SEQ ID NO: 28366
  source 1..99: mol_type = other RNA
  modified_base 1: mod_base = OTHER; note = 2'-O-methyl modified nucleotide with phosphorothioate linkage
  modified_base 2: mod_base = OTHER; note = 2'-O-methyl modified nucleotide with phosphorothioate linkage
  modified_base 3: mod_base = OTHER; note = 2'-O-methyl modified nucleotide with phosphorothioate linkage
  modified_base 96: mod_base = OTHER; note = Nucleotide with phosphorothioate linkage
  modified_base 97: mod_base = OTHER; note = 2'-O-methyl modified nucleotide with phosphorothioate linkage
  modified_base 98: mod_base = OTHER; note = 2'-O-methyl modified nucleotide with phosphorothioate linkage
  modified_base 99: mod_base = OTHER; note = 2'-O-methyl modified nucleotide

SEQ ID NO: 28929 - RNA, 98 nt, synthetic construct; identical to SEQ ID NO: 28367
  source 1..98: mol_type = other RNA
  modified_base 1: mod_base = OTHER; note = 2'-O-methyl modified nucleotide with phosphorothioate linkage
  modified_base 2: mod_base = OTHER; note = 2'-O-methyl modified nucleotide with phosphorothioate linkage
  modified_base 3: mod_base = OTHER; note = 2'-O-methyl modified nucleotide with phosphorothioate linkage
  modified_base 95: mod_base = OTHER; note = Nucleotide with phosphorothioate linkage
  modified_base 96: mod_base = OTHER; note = 2'-O-methyl modified nucleotide with phosphorothioate linkage
  modified_base 97: mod_base = OTHER; note = 2'-O-methyl modified nucleotide with phosphorothioate linkage
  modified_base 98: mod_base = OTHER; note = 2'-O-methyl modified nucleotide

SEQ ID NO: 28930 - RNA, 110 nt, synthetic construct; identical to SEQ ID NO: 28368
  source 1..110: mol_type = other RNA
  modified_base 1: mod_base = OTHER; note = 2'-O-methyl modified nucleotide with phosphorothioate linkage
  modified_base 2: mod_base = OTHER; note = 2'-O-methyl modified nucleotide with phosphorothioate linkage
  modified_base 3: mod_base = OTHER; note = 2'-O-methyl modified nucleotide with phosphorothioate linkage
  modified_base 107: mod_base = OTHER; note = Nucleotide with phosphorothioate linkage
  modified_base 108: mod_base = OTHER; note = 2'-O-methyl modified nucleotide with phosphorothioate linkage
  modified_base 109: mod_base = OTHER; note = 2'-O-methyl modified nucleotide with phosphorothioate linkage
  modified_base 110: mod_base = OTHER; note = 2'-O-methyl modified nucleotide

SEQ ID NO: 28931 - RNA, 109 nt, synthetic construct; identical to SEQ ID NO: 28369
  source 1..109: mol_type = other RNA
  modified_base 1: mod_base = OTHER; note = 2'-O-methyl modified nucleotide with phosphorothioate linkage
  modified_base 2: mod_base = OTHER; note = 2'-O-methyl modified nucleotide with phosphorothioate linkage
  modified_base 3: mod_base = OTHER; note = 2'-O-methyl modified nucleotide with phosphorothioate linkage
  modified_base 106: mod_base = OTHER; note = Nucleotide with phosphorothioate linkage
  modified_base 107: mod_base = OTHER; note = 2'-O-methyl modified nucleotide with phosphorothioate linkage
  modified_base 108: mod_base = OTHER; note = 2'-O-methyl modified nucleotide with phosphorothioate linkage
  modified_base 109: mod_base = OTHER; note = 2'-O-methyl modified nucleotide

SEQ ID NO: 28932 - RNA, 108 nt, synthetic construct; identical to SEQ ID NO: 28370
  source 1..108: mol_type = other RNA
  modified_base 1: mod_base = OTHER; note = 2'-O-methyl modified nucleotide with phosphorothioate linkage
  modified_base 2: mod_base = OTHER; note = 2'-O-methyl modified nucleotide with phosphorothioate linkage
  modified_base 3: mod_base = OTHER; note = 2'-O-methyl modified nucleotide with phosphorothioate linkage
  modified_base 105: mod_base = OTHER; note = Nucleotide with phosphorothioate linkage
  modified_base 106: mod_base = OTHER; note = 2'-O-methyl modified nucleotide with phosphorothioate linkage
  modified_base 107: mod_base = OTHER; note = 2'-O-methyl modified nucleotide with phosphorothioate linkage
  modified_base 108: mod_base = OTHER; note = 2'-O-methyl modified nucleotide

SEQ ID NO: 28933 - RNA, 107 nt, synthetic construct; identical to SEQ ID NO: 28371
  source 1..107: mol_type = other RNA
  modified_base 1: mod_base = OTHER; note = 2'-O-methyl modified nucleotide with phosphorothioate linkage
  modified_base 2: mod_base = OTHER; note = 2'-O-methyl modified nucleotide with phosphorothioate linkage
  modified_base 3: mod_base = OTHER; note = 2'-O-methyl modified nucleotide with phosphorothioate linkage
  modified_base 104: mod_base = OTHER; note = Nucleotide with phosphorothioate linkage
  modified_base 105: mod_base = OTHER; note = 2'-O-methyl modified nucleotide with phosphorothioate linkage
  modified_base 106: mod_base = OTHER; note = 2'-O-methyl modified nucleotide with phosphorothioate linkage
  modified_base 107: mod_base = OTHER; note = 2'-O-methyl modified nucleotide

SEQ ID NO: 28934 - RNA, 106 nt, synthetic construct; identical to SEQ ID NO: 28372
  source 1..106: mol_type = other RNA
  modified_base 1: mod_base = OTHER; note = 2'-O-methyl modified nucleotide with phosphorothioate linkage
  modified_base 2: mod_base = OTHER; note = 2'-O-methyl modified nucleotide with phosphorothioate linkage
  modified_base 3: mod_base = OTHER; note = 2'-O-methyl modified nucleotide with phosphorothioate linkage
  modified_base 103: mod_base = OTHER; note = Nucleotide with phosphorothioate linkage
  modified_base 104: mod_base = OTHER; note = 2'-O-methyl modified nucleotide with phosphorothioate linkage
  modified_base 105: mod_base = OTHER; note = 2'-O-methyl modified nucleotide with phosphorothioate linkage
  modified_base 106: mod_base = OTHER; note = 2'-O-methyl modified nucleotide

SEQ ID NO: 28935 - RNA, 105 nt, synthetic construct; identical to SEQ ID NO: 28373
  source 1..105: mol_type = other RNA
  modified_base 1: mod_base = OTHER; note = 2'-O-methyl modified nucleotide with phosphorothioate linkage
  modified_base 2: mod_base = OTHER; note = 2'-O-methyl modified nucleotide with phosphorothioate linkage
  modified_base 3: mod_base = OTHER; note = 2'-O-methyl modified nucleotide with phosphorothioate linkage
  modified_base 102: mod_base = OTHER; note = Nucleotide with phosphorothioate linkage
  modified_base 103: mod_base = OTHER; note = 2'-O-methyl modified nucleotide with phosphorothioate linkage
  modified_base 104: mod_base = OTHER; note = 2'-O-methyl modified nucleotide with phosphorothioate linkage
  modified_base 105: mod_base = OTHER; note = 2'-O-methyl modified nucleotide

SEQ ID NO: 28936 - RNA, 104 nt, synthetic construct; identical to SEQ ID NO: 28374
  source 1..104: mol_type = other RNA
  modified_base 1: mod_base = OTHER; note = 2'-O-methyl modified nucleotide with phosphorothioate linkage
  modified_base 2: mod_base = OTHER; note = 2'-O-methyl modified nucleotide with phosphorothioate linkage
  modified_base 3: mod_base = OTHER; note = 2'-O-methyl modified nucleotide with phosphorothioate linkage
  modified_base 101: mod_base = OTHER; note = Nucleotide with phosphorothioate linkage
  modified_base 102: mod_base = OTHER; note = 2'-O-methyl modified nucleotide with phosphorothioate linkage
  modified_base 103: mod_base = OTHER; note = 2'-O-methyl modified nucleotide with phosphorothioate linkage
  modified_base 104: mod_base = OTHER; note = 2'-O-methyl modified nucleotide

SEQ ID NO: 28937 - RNA, 103 nt, synthetic construct; identical to SEQ ID NO: 28375
  source 1..103: mol_type = other RNA
  modified_base 1: mod_base = OTHER; note = 2'-O-methyl modified nucleotide with phosphorothioate linkage
  modified_base 2: mod_base = OTHER; note = 2'-O-methyl modified nucleotide with phosphorothioate linkage
  modified_base 3: mod_base = OTHER; note = 2'-O-methyl modified nucleotide with phosphorothioate linkage
  modified_base 100: mod_base = OTHER; note = Nucleotide with phosphorothioate linkage
  modified_base 101: mod_base = OTHER; note = 2'-O-methyl modified nucleotide with phosphorothioate linkage
  modified_base 102: mod_base = OTHER; note = 2'-O-methyl modified nucleotide with phosphorothioate linkage
  modified_base 103: mod_base = OTHER; note = 2'-O-methyl modified nucleotide

SEQ ID NO: 28938 - RNA, 102 nt, synthetic construct; identical to SEQ ID NO: 28376
  source 1..102: mol_type = other RNA
  modified_base 1: mod_base = OTHER; note = 2'-O-methyl modified nucleotide with phosphorothioate linkage
  modified_base 2: mod_base = OTHER; note = 2'-O-methyl modified nucleotide with phosphorothioate linkage
  modified_base 3: mod_base = OTHER; note = 2'-O-methyl modified nucleotide with phosphorothioate linkage
  modified_base 99: mod_base = OTHER; note = Nucleotide with phosphorothioate linkage
  modified_base 100: mod_base = OTHER; note = 2'-O-methyl modified nucleotide with phosphorothioate linkage
  modified_base 101: mod_base = OTHER; note = 2'-O-methyl modified nucleotide with phosphorothioate linkage
  modified_base 102: mod_base = OTHER; note = 2'-O-methyl modified nucleotide

SEQ ID NO: 28939 - RNA, 101 nt, synthetic construct; identical to SEQ ID NO: 28377
  source 1..101: mol_type = other RNA
  modified_base 1: mod_base = OTHER; note = 2'-O-methyl modified nucleotide with phosphorothioate linkage
  modified_base 2: mod_base = OTHER; note = 2'-O-methyl modified nucleotide with phosphorothioate linkage
  modified_base 3: mod_base = OTHER; note = 2'-O-methyl modified nucleotide with phosphorothioate linkage
  modified_base 98: mod_base = OTHER; note = Nucleotide with phosphorothioate linkage
  modified_base 99: mod_base = OTHER; note = 2'-O-methyl modified nucleotide with phosphorothioate linkage
  modified_base 100: mod_base = OTHER; note = 2'-O-methyl modified nucleotide with phosphorothioate linkage
  modified_base 101: mod_base = OTHER; note = 2'-O-methyl modified nucleotide

SEQ ID NO: 28940 - RNA, 100 nt, synthetic construct; identical to SEQ ID NO: 28378
  source 1..100: mol_type = other RNA
  modified_base 1: mod_base = OTHER; note = 2'-O-methyl modified nucleotide with phosphorothioate linkage
  modified_base 2: mod_base = OTHER; note = 2'-O-methyl modified nucleotide with phosphorothioate linkage
  modified_base 3: mod_base = OTHER; note = 2'-O-methyl modified nucleotide with phosphorothioate linkage
  modified_base 97: mod_base = OTHER; note = Nucleotide with phosphorothioate linkage
  modified_base 98: mod_base = OTHER; note = 2'-O-methyl modified nucleotide with phosphorothioate linkage
  modified_base 99: mod_base = OTHER; note = 2'-O-methyl modified nucleotide with phosphorothioate linkage
  modified_base 100: mod_base = OTHER; note = 2'-O-methyl modified nucleotide

SEQ ID NO: 28941 - RNA, 99 nt, synthetic construct; identical to SEQ ID NO: 28379
  source 1..99: mol_type = other RNA
  modified_base 1: mod_base = OTHER; note = 2'-O-methyl modified nucleotide with phosphorothioate linkage
  modified_base 2: mod_base = OTHER; note = 2'-O-methyl modified nucleotide with phosphorothioate linkage
  modified_base 3: mod_base = OTHER; note = 2'-O-methyl modified nucleotide with phosphorothioate linkage
  modified_base 96: mod_base = OTHER; note = Nucleotide with phosphorothioate linkage
  modified_base 97: mod_base = OTHER; note = 2'-O-methyl modified nucleotide with phosphorothioate linkage
  modified_base 98: mod_base = OTHER; note = 2'-O-methyl modified nucleotide with phosphorothioate linkage
  modified_base 99: mod_base = OTHER; note = 2'-O-methyl modified nucleotide

SEQ ID NO: 28942 - RNA, 111 nt, synthetic construct; identical to SEQ ID NO: 28380
  source 1..111: mol_type = other RNA
  modified_base 1: mod_base = OTHER; note = 2'-O-methyl modified nucleotide with phosphorothioate linkage
  modified_base 2: mod_base = OTHER; note = 2'-O-methyl modified nucleotide with phosphorothioate linkage
  modified_base 3: mod_base = OTHER; note = 2'-O-methyl modified nucleotide with phosphorothioate linkage
  modified_base 108: mod_base = OTHER; note = Nucleotide with phosphorothioate linkage
  modified_base 109: mod_base = OTHER; note = 2'-O-methyl modified nucleotide with phosphorothioate linkage
  modified_base 110: mod_base = OTHER; note = 2'-O-methyl modified nucleotide with phosphorothioate linkage
  modified_base 111: mod_base = OTHER; note = 2'-O-methyl modified nucleotide

SEQ ID NO: 28943 - RNA, 110 nt, synthetic construct; identical to SEQ ID NO: 28381
  source 1..110: mol_type = other RNA
  modified_base 1: mod_base = OTHER; note = 2'-O-methyl modified nucleotide with phosphorothioate linkage
  modified_base 2: mod_base = OTHER; note = 2'-O-methyl modified nucleotide with phosphorothioate linkage
  modified_base 3: mod_base = OTHER; note = 2'-O-methyl modified nucleotide with phosphorothioate linkage
  modified_base 107: mod_base = OTHER; note = Nucleotide with phosphorothioate linkage
  modified_base 108: mod_base = OTHER; note = 2'-O-methyl modified nucleotide with phosphorothioate linkage
  modified_base 109: mod_base = OTHER; note = 2'-O-methyl modified nucleotide with phosphorothioate linkage
  modified_base 110: mod_base = OTHER; note = 2'-O-methyl modified nucleotide

SEQ ID NO: 28944 - RNA, 109 nt, synthetic construct; identical to SEQ ID NO: 28382
  source 1..109: mol_type = other RNA
  modified_base 1: mod_base = OTHER; note = 2'-O-methyl modified nucleotide with phosphorothioate linkage
  modified_base 2: mod_base = OTHER; note = 2'-O-methyl modified nucleotide with phosphorothioate linkage
  modified_base 3: mod_base = OTHER; note = 2'-O-methyl modified nucleotide with phosphorothioate linkage
  modified_base 106: mod_base = OTHER; note = Nucleotide with phosphorothioate linkage
  modified_base 107: mod_base = OTHER; note = 2'-O-methyl modified nucleotide with phosphorothioate linkage
  modified_base 108: mod_base = OTHER; note = 2'-O-methyl modified nucleotide with phosphorothioate linkage
  modified_base 109: mod_base = OTHER; note = 2'-O-methyl modified nucleotide

SEQ ID NO: 28945 - RNA, 108 nt, synthetic construct; identical to SEQ ID NO: 28383
  source 1..108: mol_type = other RNA
  modified_base 1: mod_base = OTHER; note = 2'-O-methyl modified nucleotide with phosphorothioate linkage
  modified_base 2: mod_base = OTHER; note = 2'-O-methyl modified nucleotide with phosphorothioate linkage
  modified_base 3: mod_base = OTHER; note = 2'-O-methyl modified nucleotide with phosphorothioate linkage
  modified_base 105: mod_base = OTHER; note = Nucleotide with phosphorothioate linkage
  modified_base 106: mod_base = OTHER; note = 2'-O-methyl modified nucleotide with phosphorothioate linkage
  modified_base 107: mod_base = OTHER; note = 2'-O-methyl modified nucleotide with phosphorothioate linkage
  modified_base 108: mod_base = OTHER; note = 2'-O-methyl modified nucleotide

SEQ ID NO: 28946 - RNA, 107 nt, synthetic construct; identical to SEQ ID NO: 28384
  source 1..107: mol_type = other RNA
  modified_base 1: mod_base = OTHER; note = 2'-O-methyl modified nucleotide with phosphorothioate linkage
  modified_base 2: mod_base = OTHER; note = 2'-O-methyl modified nucleotide with phosphorothioate linkage
  modified_base 3: mod_base = OTHER; note = 2'-O-methyl modified nucleotide with phosphorothioate linkage
  modified_base 104: mod_base = OTHER; note = Nucleotide with phosphorothioate linkage
  modified_base 105: mod_base = OTHER; note = 2'-O-methyl modified nucleotide with phosphorothioate linkage
  modified_base 106: mod_base = OTHER; note = 2'-O-methyl modified nucleotide with phosphorothioate linkage
  modified_base 107: mod_base = OTHER; note = 2'-O-methyl modified nucleotide

SEQ ID NO: 28947 - RNA, 106 nt, synthetic construct; identical to SEQ ID NO: 28385
  source 1..106: mol_type = other RNA
  modified_base 1: mod_base = OTHER; note = 2'-O-methyl modified nucleotide with phosphorothioate linkage
  modified_base 2: mod_base = OTHER; note = 2'-O-methyl modified nucleotide with phosphorothioate linkage
  modified_base 3: mod_base = OTHER; note = 2'-O-methyl modified nucleotide with phosphorothioate linkage
  modified_base 103: mod_base = OTHER; note = Nucleotide with phosphorothioate linkage
  modified_base 104: mod_base = OTHER; note = 2'-O-methyl modified nucleotide with phosphorothioate linkage
  modified_base 105: mod_base = OTHER; note = 2'-O-methyl modified nucleotide with phosphorothioate linkage
  modified_base 106: mod_base = OTHER; note = 2'-O-methyl modified nucleotide

SEQ ID NO: 28948 - RNA, 105 nt, synthetic construct; identical to SEQ ID NO: 28386
  source 1..105: mol_type = other RNA
  modified_base 1: mod_base = OTHER; note = 2'-O-methyl modified nucleotide with phosphorothioate linkage
  modified_base 2: mod_base = OTHER; note = 2'-O-methyl modified nucleotide with phosphorothioate linkage
  modified_base 3: mod_base = OTHER; note = 2'-O-methyl modified nucleotide with phosphorothioate linkage
  modified_base 102: mod_base = OTHER; note = Nucleotide with phosphorothioate linkage
  modified_base 103: mod_base = OTHER; note = 2'-O-methyl modified nucleotide with phosphorothioate linkage
  modified_base 104: mod_base = OTHER; note = 2'-O-methyl modified nucleotide with phosphorothioate linkage
  modified_base 105: mod_base = OTHER; note = 2'-O-methyl modified nucleotide

SEQ ID NO: 28949 - RNA, 104 nt, synthetic construct; identical to SEQ ID NO: 28387
  source 1..104: mol_type = other RNA
  modified_base 1: mod_base = OTHER; note = 2'-O-methyl modified nucleotide with phosphorothioate linkage
  modified_base 2: mod_base = OTHER; note = 2'-O-methyl modified nucleotide with phosphorothioate linkage
  modified_base 3: mod_base = OTHER; note = 2'-O-methyl modified nucleotide with phosphorothioate linkage
  modified_base 101: mod_base = OTHER; note = Nucleotide with phosphorothioate linkage
  modified_base 102: mod_base = OTHER; note = 2'-O-methyl modified nucleotide with phosphorothioate linkage
  modified_base 103: mod_base = OTHER; note = 2'-O-methyl modified nucleotide with phosphorothioate linkage
  modified_base 104: mod_base = OTHER; note = 2'-O-methyl modified nucleotide

SEQ ID NO: 28950 - RNA, 103 nt, synthetic construct; identical to SEQ ID NO: 27183
  source 1..103: mol_type = other RNA
  modified_base 1: mod_base = OTHER; note = 2'-O-methyl modified nucleotide with phosphorothioate linkage
  modified_base 2: mod_base = OTHER; note = 2'-O-methyl modified nucleotide with phosphorothioate linkage
  modified_base 3: mod_base = OTHER; note = 2'-O-methyl modified nucleotide with phosphorothioate linkage
  modified_base 100: mod_base = OTHER; note = Nucleotide with phosphorothioate linkage
  modified_base 101: mod_base = OTHER; note = 2'-O-methyl modified nucleotide with phosphorothioate linkage
  modified_base 102: mod_base = OTHER; note = 2'-O-methyl modified nucleotide with phosphorothioate linkage
  modified_base 103: mod_base = OTHER; note = 2'-O-methyl modified nucleotide

SEQ ID NO: 28951 - RNA, 102 nt, synthetic construct; identical to SEQ ID NO: 27184
  source 1..102: mol_type = other RNA
  modified_base 1: mod_base = OTHER; note = 2'-O-methyl modified nucleotide with phosphorothioate linkage
  modified_base 2: mod_base = OTHER; note = 2'-O-methyl modified nucleotide with phosphorothioate linkage
  modified_base 3: mod_base = OTHER; note = 2'-O-methyl modified nucleotide with phosphorothioate linkage
  modified_base 99: mod_base = OTHER; note = Nucleotide with phosphorothioate linkage
  modified_base 100: mod_base = OTHER; note = 2'-O-methyl modified nucleotide with phosphorothioate linkage
  modified_base 101: mod_base = OTHER; note = 2'-O-methyl modified nucleotide with phosphorothioate linkage
  modified_base 102: mod_base = OTHER; note = 2'-O-methyl modified nucleotide

SEQ ID NO: 28952 - RNA, 101 nt, synthetic construct; identical to SEQ ID NO: 28390
  source 1..101: mol_type = other RNA
  modified_base 1: mod_base = OTHER; note = 2'-O-methyl modified nucleotide with phosphorothioate linkage
  modified_base 2: mod_base = OTHER; note = 2'-O-methyl modified nucleotide with phosphorothioate linkage
  modified_base 3: mod_base = OTHER; note = 2'-O-methyl modified nucleotide with phosphorothioate linkage
  modified_base 98: mod_base = OTHER; note = Nucleotide with phosphorothioate linkage
  modified_base 99: mod_base = OTHER; note = 2'-O-methyl modified nucleotide with phosphorothioate linkage
  modified_base 100: mod_base = OTHER; note = 2'-O-methyl modified nucleotide with phosphorothioate linkage
  modified_base 101: mod_base = OTHER; note = 2'-O-methyl modified nucleotide

SEQ ID NO: 28953 - RNA, 100 nt, synthetic construct; identical to SEQ ID NO: 28391
  source 1..100: mol_type = other RNA
  modified_base 1: mod_base = OTHER; note = 2'-O-methyl modified nucleotide with phosphorothioate linkage
  modified_base 2: mod_base = OTHER; note = 2'-O-methyl modified nucleotide with phosphorothioate linkage
  modified_base 3: mod_base = OTHER; note = 2'-O-methyl modified nucleotide with phosphorothioate linkage
  modified_base 97: mod_base = OTHER; note = Nucleotide with phosphorothioate linkage
  modified_base 98: mod_base = OTHER; note = 2'-O-methyl modified nucleotide with phosphorothioate linkage
  modified_base 99: mod_base = OTHER; note = 2'-O-methyl modified nucleotide with phosphorothioate linkage
  modified_base 100: mod_base = OTHER; note = 2'-O-methyl modified nucleotide

SEQ ID NO: 28954 - RNA, 112 nt, synthetic construct; identical to SEQ ID NO: 28392
  source 1..112: mol_type = other RNA
  modified_base 1: mod_base = OTHER; note = 2'-O-methyl modified nucleotide with phosphorothioate linkage
  modified_base 2: mod_base = OTHER; note = 2'-O-methyl modified nucleotide with phosphorothioate linkage
  modified_base 3: mod_base = OTHER; note = 2'-O-methyl modified nucleotide with phosphorothioate linkage
  modified_base 109: mod_base = OTHER; note = Nucleotide with phosphorothioate linkage
  modified_base 110: mod_base = OTHER; note = 2'-O-methyl modified nucleotide with phosphorothioate linkage
  modified_base 111: mod_base = OTHER; note = 2'-O-methyl modified nucleotide with phosphorothioate linkage
  modified_base 112: mod_base = OTHER; note = 2'-O-methyl modified nucleotide

SEQ ID NO: 28955 - RNA, 111 nt, synthetic construct; identical to SEQ ID NO: 28393
  source 1..111: mol_type = other RNA
  modified_base 1: mod_base = OTHER; note = 2'-O-methyl modified nucleotide with phosphorothioate linkage
  modified_base 2: mod_base = OTHER; note = 2'-O-methyl modified nucleotide with phosphorothioate linkage
  modified_base 3: mod_base = OTHER; note = 2'-O-methyl modified nucleotide with phosphorothioate linkage
  modified_base 108: mod_base = OTHER; note = Nucleotide with phosphorothioate linkage
  modified_base 109: mod_base = OTHER; note = 2'-O-methyl modified nucleotide with phosphorothioate linkage
  modified_base 110: mod_base = OTHER; note = 2'-O-methyl modified nucleotide with phosphorothioate linkage
  modified_base 111: mod_base = OTHER; note = 2'-O-methyl modified nucleotide

SEQ ID NO: 28956 - RNA, 110 nt, synthetic construct; identical to SEQ ID NO: 28394
  source 1..110: mol_type = other RNA
  modified_base 1: mod_base = OTHER; note = 2'-O-methyl modified nucleotide with phosphorothioate linkage
  modified_base 2: mod_base = OTHER; note = 2'-O-methyl modified nucleotide with phosphorothioate linkage
  modified_base 3: mod_base = OTHER; note = 2'-O-methyl modified nucleotide with phosphorothioate linkage
  modified_base 107: mod_base = OTHER; note = Nucleotide with phosphorothioate linkage
  modified_base 108: mod_base = OTHER; note = 2'-O-methyl modified nucleotide with phosphorothioate linkage
  modified_base 109: mod_base = OTHER; note = 2'-O-methyl modified nucleotide with phosphorothioate linkage
  modified_base 110: mod_base = OTHER; note = 2'-O-methyl modified nucleotide

SEQ ID NO: 28957 - RNA, 109 nt, synthetic construct; identical to SEQ ID NO: 28395
  source 1..109: mol_type = other RNA
  modified_base 1: mod_base = OTHER; note = 2'-O-methyl modified nucleotide with phosphorothioate linkage
  modified_base 2: mod_base = OTHER; note = 2'-O-methyl modified nucleotide with phosphorothioate linkage
  modified_base 3: mod_base = OTHER; note = 2'-O-methyl modified nucleotide with phosphorothioate linkage
  modified_base 106: mod_base = OTHER; note = Nucleotide with phosphorothioate linkage
  modified_base 107: mod_base = OTHER; note = 2'-O-methyl modified nucleotide with phosphorothioate linkage
  modified_base 108: mod_base = OTHER; note = 2'-O-methyl modified nucleotide with phosphorothioate linkage
  modified_base 109: mod_base = OTHER; note = 2'-O-methyl modified nucleotide

SEQ ID NO: 28958 - RNA, 108 nt, synthetic construct; identical to SEQ ID NO: 28396
  source 1..108: mol_type = other RNA
  modified_base 1: mod_base = OTHER; note = 2'-O-methyl modified nucleotide with phosphorothioate linkage
  modified_base 2: mod_base = OTHER; note = 2'-O-methyl modified nucleotide with phosphorothioate linkage
  modified_base 3: mod_base = OTHER; note = 2'-O-methyl modified nucleotide with phosphorothioate linkage
  modified_base 105: mod_base = OTHER; note = Nucleotide with phosphorothioate linkage
  modified_base 106: mod_base = OTHER; note = 2'-O-methyl modified nucleotide with phosphorothioate linkage
  modified_base 107: mod_base = OTHER; note = 2'-O-methyl modified nucleotide with phosphorothioate linkage
  modified_base 108: mod_base = OTHER; note = 2'-O-methyl modified nucleotide

SEQ ID NO: 28959 - RNA, 107 nt, synthetic construct; identical to SEQ ID NO: 28397
  source 1..107: mol_type = other RNA
  modified_base 1: mod_base = OTHER; note = 2'-O-methyl modified nucleotide with phosphorothioate linkage
  modified_base 2: mod_base = OTHER; note = 2'-O-methyl modified nucleotide with phosphorothioate linkage
  modified_base 3: mod_base = OTHER; note = 2'-O-methyl modified nucleotide with phosphorothioate linkage
  modified_base 104: mod_base = OTHER; note = Nucleotide with phosphorothioate linkage
  modified_base 105: mod_base = OTHER; note = 2'-O-methyl modified nucleotide with phosphorothioate linkage
  modified_base 106: mod_base = OTHER; note = 2'-O-methyl modified nucleotide with phosphorothioate linkage
  modified_base 107: mod_base = OTHER; note = 2'-O-methyl modified nucleotide

SEQ ID NO: 28960 - RNA, 106 nt, synthetic construct; identical to SEQ ID NO: 28398
  source 1..106: mol_type = other RNA
  modified_base 1: mod_base = OTHER; note = 2'-O-methyl modified nucleotide with phosphorothioate linkage
  modified_base 2: mod_base = OTHER; note = 2'-O-methyl modified nucleotide with phosphorothioate linkage
  modified_base 3: mod_base = OTHER; note = 2'-O-methyl modified nucleotide with phosphorothioate linkage
  modified_base 103: mod_base = OTHER; note = Nucleotide with phosphorothioate linkage
  modified_base 104: mod_base = OTHER; note = 2'-O-methyl modified nucleotide with phosphorothioate linkage
  modified_base 105: mod_base = OTHER; note = 2'-O-methyl modified nucleotide with phosphorothioate linkage
  modified_base 106: mod_base = OTHER; note = 2'-O-methyl modified nucleotide

SEQ ID NO: 28961 - RNA, 105 nt, synthetic construct; identical to SEQ ID NO: 28399
  source 1..105: mol_type = other RNA
  modified_base 1: mod_base = OTHER; note = 2'-O-methyl modified nucleotide with phosphorothioate linkage
  modified_base 2: mod_base = OTHER; note = 2'-O-methyl modified nucleotide with phosphorothioate linkage
  modified_base 3: mod_base = OTHER; note = 2'-O-methyl modified nucleotide with phosphorothioate linkage
  modified_base 102: mod_base = OTHER; note = Nucleotide with phosphorothioate linkage
  modified_base 103: mod_base = OTHER; note = 2'-O-methyl modified nucleotide with phosphorothioate linkage
  modified_base 104: mod_base = OTHER; note = 2'-O-methyl modified nucleotide with phosphorothioate linkage
  modified_base 105: mod_base = OTHER; note = 2'-O-methyl modified nucleotide

SEQ ID NO: 28962 - RNA, 104 nt, synthetic construct; identical to SEQ ID NO: 28400
  source 1..104: mol_type = other RNA
  modified_base 1: mod_base = OTHER; note = 2'-O-methyl modified nucleotide with phosphorothioate linkage
  modified_base 2: mod_base = OTHER; note = 2'-O-methyl modified nucleotide with phosphorothioate linkage
  modified_base 3: mod_base = OTHER; note = 2'-O-methyl modified nucleotide with phosphorothioate linkage
  modified_base 101: mod_base = OTHER; note = Nucleotide with phosphorothioate linkage
  modified_base 102: mod_base = OTHER; note = 2'-O-methyl modified nucleotide with phosphorothioate linkage
  modified_base 103: mod_base = OTHER; note = 2'-O-methyl modified nucleotide with phosphorothioate linkage
  modified_base 104: mod_base = OTHER; note = 2'-O-methyl modified nucleotide

SEQ ID NO: 28963 - RNA, 103 nt, synthetic construct; identical to SEQ ID NO: 28401
  source 1..103: mol_type = other RNA
  modified_base 1: mod_base = OTHER; note = 2'-O-methyl modified nucleotide with phosphorothioate linkage
  modified_base 2: mod_base = OTHER; note = 2'-O-methyl modified nucleotide with phosphorothioate linkage
  modified_base 3: mod_base = OTHER; note = 2'-O-methyl modified nucleotide with phosphorothioate linkage
  modified_base 100: mod_base = OTHER; note = Nucleotide with phosphorothioate linkage
  modified_base 101: mod_base = OTHER; note = 2'-O-methyl modified nucleotide with phosphorothioate linkage
  modified_base 102: mod_base = OTHER; note = 2'-O-methyl modified nucleotide with phosphorothioate linkage
  modified_base 103: mod_base = OTHER; note = 2'-O-methyl modified nucleotide

SEQ ID NO: 28964 - RNA, 102 nt, synthetic construct; identical to SEQ ID NO: 28402
  source 1..102: mol_type = other RNA
  modified_base 1: mod_base = OTHER; note = 2'-O-methyl modified nucleotide with phosphorothioate linkage
  modified_base 2: mod_base = OTHER; note = 2'-O-methyl modified nucleotide with phosphorothioate linkage
  modified_base 3: mod_base = OTHER; note = 2'-O-methyl modified nucleotide with phosphorothioate linkage
  modified_base 99: mod_base = OTHER; note = Nucleotide with phosphorothioate linkage
  modified_base 100: mod_base = OTHER; note = 2'-O-methyl modified nucleotide with phosphorothioate linkage
  modified_base 101: mod_base = OTHER; note = 2'-O-methyl modified nucleotide with phosphorothioate linkage
  modified_base 102: mod_base = OTHER; note = 2'-O-methyl modified nucleotide

SEQ ID NO: 28965 - RNA, 101 nt, synthetic construct; identical to SEQ ID NO: 28403
  source 1..101: mol_type = other RNA
  modified_base 1: mod_base = OTHER; note = 2'-O-methyl modified nucleotide with phosphorothioate linkage
  modified_base 2: mod_base = OTHER; note = 2'-O-methyl modified nucleotide with phosphorothioate linkage
  modified_base 3: mod_base = OTHER; note = 2'-O-methyl modified nucleotide with phosphorothioate linkage
  modified_base 98: mod_base = OTHER; note = Nucleotide with phosphorothioate linkage
  modified_base 99: mod_base = OTHER; note = 2'-O-methyl modified nucleotide with phosphorothioate linkage
  modified_base 100: mod_base = OTHER; note = 2'-O-methyl modified nucleotide with phosphorothioate linkage
  modified_base 101: mod_base = OTHER; note = 2'-O-methyl modified nucleotide

SEQ ID NO: 28966 - RNA, 113 nt, synthetic construct; identical to SEQ ID NO: 28404
  source 1..113: mol_type = other RNA
  modified_base 1: mod_base = OTHER; note = 2'-O-methyl modified nucleotide with phosphorothioate linkage
  modified_base 2: mod_base = OTHER; note = 2'-O-methyl modified nucleotide with phosphorothioate linkage
  modified_base 3: mod_base = OTHER; note = 2'-O-methyl modified nucleotide with phosphorothioate linkage
  modified_base 110: mod_base = OTHER; note = Nucleotide with phosphorothioate linkage
  modified_base 111: mod_base = OTHER; note = 2'-O-methyl modified nucleotide with phosphorothioate linkage
  modified_base 112: mod_base = OTHER; note = 2'-O-methyl modified nucleotide with phosphorothioate linkage
  modified_base 113: mod_base = OTHER; note = 2'-O-methyl modified nucleotide

SEQ ID NO: 28967 - RNA, 112 nt, synthetic construct; identical to SEQ ID NO: 28405
  source 1..112: mol_type = other RNA
  modified_base 1: mod_base = OTHER; note = 2'-O-methyl modified nucleotide with phosphorothioate linkage
  modified_base 2: mod_base = OTHER; note = 2'-O-methyl modified nucleotide with phosphorothioate linkage
  modified_base 3: mod_base = OTHER; note = 2'-O-methyl modified nucleotide with phosphorothioate linkage
  modified_base 109: mod_base = OTHER; note = Nucleotide with phosphorothioate linkage
  modified_base 110: mod_base = OTHER; note = 2'-O-methyl modified nucleotide with phosphorothioate linkage
  modified_base 111: mod_base = OTHER; note = 2'-O-methyl modified nucleotide with phosphorothioate linkage
  modified_base 112: mod_base = OTHER; note = 2'-O-methyl modified nucleotide

SEQ ID NO: 28968 - RNA, 111 nt, synthetic construct; identical to SEQ ID NO: 28406
  source 1..111: mol_type = other RNA
  modified_base 1: mod_base = OTHER; note = 2'-O-methyl modified nucleotide with phosphorothioate linkage
  modified_base 2: mod_base = OTHER; note = 2'-O-methyl modified nucleotide with phosphorothioate linkage
  modified_base 3: mod_base = OTHER; note = 2'-O-methyl modified nucleotide with phosphorothioate linkage
  modified_base 108: mod_base = OTHER; note = Nucleotide with phosphorothioate linkage
  modified_base 109: mod_base = OTHER; note = 2'-O-methyl modified nucleotide with phosphorothioate linkage
  modified_base 110: mod_base = OTHER; note = 2'-O-methyl modified nucleotide with phosphorothioate linkage
  modified_base 111: mod_base = OTHER; note = 2'-O-methyl modified nucleotide

SEQ ID NO: 28969 - RNA, 110 nt, synthetic construct; identical to SEQ ID NO: 28407
  source 1..110: mol_type = other RNA
  modified_base 1: mod_base = OTHER; note = 2'-O-methyl modified nucleotide with phosphorothioate linkage
  modified_base 2: mod_base = OTHER; note = 2'-O-methyl modified nucleotide with phosphorothioate linkage
  modified_base 3: mod_base = OTHER; note = 2'-O-methyl modified nucleotide with phosphorothioate linkage
  modified_base 107: mod_base = OTHER; note = Nucleotide with phosphorothioate linkage
  modified_base 108: mod_base = OTHER; note = 2'-O-methyl modified nucleotide with phosphorothioate linkage
  modified_base 109: mod_base = OTHER; note = 2'-O-methyl modified nucleotide with phosphorothioate linkage
  modified_base 110: mod_base = OTHER; note = 2'-O-methyl modified nucleotide

SEQ ID NO: 28970 - RNA, 109 nt, synthetic construct; identical to SEQ ID NO: 28408
  source 1..109: mol_type = other RNA
  modified_base 1: mod_base = OTHER; note = 2'-O-methyl modified nucleotide with phosphorothioate linkage
  modified_base 2: mod_base = OTHER; note = 2'-O-methyl modified nucleotide with phosphorothioate linkage
  modified_base 3: mod_base = OTHER; note = 2'-O-methyl modified nucleotide with phosphorothioate linkage
  modified_base 106: mod_base = OTHER; note = Nucleotide with phosphorothioate linkage
  modified_base 107: mod_base = OTHER; note = 2'-O-methyl modified nucleotide with phosphorothioate linkage
  modified_base 108: mod_base = OTHER; note = 2'-O-methyl modified nucleotide with phosphorothioate linkage
  modified_base 109: mod_base = OTHER; note = 2'-O-methyl modified nucleotide

SEQ ID NO: 28971 - RNA, 108 nt, synthetic construct; identical to SEQ ID NO: 28409
  source 1..108: mol_type = other RNA
  modified_base 1: mod_base = OTHER; note = 2'-O-methyl modified nucleotide with phosphorothioate linkage
  modified_base 2: mod_base = OTHER; note = 2'-O-methyl modified nucleotide with phosphorothioate linkage
  modified_base 3: mod_base = OTHER; note = 2'-O-methyl modified nucleotide with phosphorothioate linkage
  modified_base 105: mod_base = OTHER; note = Nucleotide with phosphorothioate linkage
  modified_base 106: mod_base = OTHER; note = 2'-O-methyl modified nucleotide with phosphorothioate linkage
  modified_base 107: mod_base = OTHER; note = 2'-O-methyl modified nucleotide with phosphorothioate linkage
  modified_base 108: mod_base = OTHER; note = 2'-O-methyl modified nucleotide

SEQ ID NO: 28972 - RNA, 107 nt, synthetic construct; identical to SEQ ID NO: 28410
  source 1..107: mol_type = other RNA
  modified_base 1: mod_base = OTHER; note = 2'-O-methyl modified nucleotide with phosphorothioate linkage
  modified_base 2: mod_base = OTHER; note = 2'-O-methyl modified nucleotide with phosphorothioate linkage
  modified_base 3: mod_base = OTHER; note = 2'-O-methyl modified nucleotide with phosphorothioate linkage
  modified_base 104: mod_base = OTHER; note = Nucleotide with phosphorothioate linkage
  modified_base 105: mod_base = OTHER; note = 2'-O-methyl modified nucleotide with phosphorothioate linkage
  modified_base 106: mod_base = OTHER; note = 2'-O-methyl modified nucleotide with phosphorothioate linkage
  modified_base 107: mod_base = OTHER; note = 2'-O-methyl modified nucleotide

SEQ ID NO: 28973 - RNA, 106 nt, synthetic construct; identical to SEQ ID NO: 28411
  source 1..106: mol_type = other RNA
  modified_base 1: mod_base = OTHER; note = 2'-O-methyl modified nucleotide with phosphorothioate linkage
  modified_base 2: mod_base = OTHER; note = 2'-O-methyl modified nucleotide with phosphorothioate linkage
  modified_base 3: mod_base = OTHER; note = 2'-O-methyl modified nucleotide with phosphorothioate linkage
  modified_base 103: mod_base = OTHER; note = Nucleotide with phosphorothioate linkage
  modified_base 104: mod_base = OTHER; note = 2'-O-methyl modified nucleotide with phosphorothioate linkage
  modified_base 105: mod_base = OTHER; note = 2'-O-methyl modified nucleotide with phosphorothioate linkage
  modified_base 106: mod_base = OTHER; note = 2'-O-methyl modified nucleotide

SEQ ID NO: 28974 - RNA, 105 nt, synthetic construct; identical to SEQ ID NO: 28412
  source 1..105: mol_type = other RNA
  modified_base 1: mod_base = OTHER; note = 2'-O-methyl modified nucleotide with phosphorothioate linkage
  modified_base 2: mod_base = OTHER; note = 2'-O-methyl modified nucleotide with phosphorothioate linkage
  modified_base 3: mod_base = OTHER; note = 2'-O-methyl modified nucleotide with phosphorothioate linkage
  modified_base 102: mod_base = OTHER; note = Nucleotide with phosphorothioate linkage
  modified_base 103: mod_base = OTHER; note = 2'-O-methyl modified nucleotide with phosphorothioate linkage
  modified_base 104: mod_base = OTHER; note = 2'-O-methyl modified nucleotide with phosphorothioate linkage
  modified_base 105: mod_base = OTHER; note = 2'-O-methyl modified nucleotide

SEQ ID NO: 28975 - RNA, 104 nt, synthetic construct; identical to SEQ ID NO: 28413
  source 1..104: mol_type = other RNA
  modified_base 1: mod_base = OTHER; note = 2'-O-methyl modified nucleotide with phosphorothioate linkage
  modified_base 2: mod_base = OTHER; note = 2'-O-methyl modified nucleotide with phosphorothioate linkage
  modified_base 3: mod_base = OTHER; note = 2'-O-methyl modified nucleotide with phosphorothioate linkage
  modified_base 101: mod_base = OTHER; note = Nucleotide with phosphorothioate linkage
  modified_base 102: mod_base = OTHER; note = 2'-O-methyl modified nucleotide with phosphorothioate linkage
  modified_base 103: mod_base = OTHER; note = 2'-O-methyl modified nucleotide with phosphorothioate linkage
  modified_base 104: mod_base = OTHER; note = 2'-O-methyl modified nucleotide

SEQ ID NO: 28976 - RNA, 103 nt, synthetic construct; identical to SEQ ID NO: 28414
  source 1..103: mol_type = other RNA
  modified_base 1: mod_base = OTHER; note = 2'-O-methyl modified nucleotide with phosphorothioate linkage
  modified_base 2: mod_base = OTHER; note = 2'-O-methyl modified nucleotide with phosphorothioate linkage
  modified_base 3: mod_base = OTHER; note = 2'-O-methyl modified nucleotide with phosphorothioate linkage
  modified_base 100: mod_base = OTHER; note = Nucleotide with phosphorothioate linkage
  modified_base 101: mod_base = OTHER; note = 2'-O-methyl modified nucleotide with phosphorothioate linkage
  modified_base 102: mod_base = OTHER; note = 2'-O-methyl modified nucleotide with phosphorothioate linkage
  modified_base 103: mod_base = OTHER; note = 2'-O-methyl modified nucleotide

SEQ ID NO: 28977 - RNA, 102 nt, synthetic construct; identical to SEQ ID NO: 28415
  source 1..102: mol_type = other RNA
  modified_base 1: mod_base = OTHER; note = 2'-O-methyl modified nucleotide with phosphorothioate linkage
  modified_base 2: mod_base = OTHER; note = 2'-O-methyl modified nucleotide with phosphorothioate linkage
  modified_base 3: mod_base = OTHER; note = 2'-O-methyl modified nucleotide with phosphorothioate linkage
  modified_base 99: mod_base = OTHER; note = Nucleotide with phosphorothioate linkage
  modified_base 100: mod_base = OTHER; note = 2'-O-methyl modified nucleotide with phosphorothioate linkage
  modified_base 101: mod_base = OTHER; note = 2'-O-methyl modified nucleotide with phosphorothioate linkage
  modified_base 102: mod_base = OTHER; note = 2'-O-methyl modified nucleotide

SEQ ID NO: 28978 - RNA, 114 nt, synthetic construct; identical to SEQ ID NO: 28416
  source 1..114: mol_type = other RNA
  modified_base 1: mod_base = OTHER; note = 2'-O-methyl modified nucleotide with phosphorothioate linkage
  modified_base 2: mod_base = OTHER; note = 2'-O-methyl modified nucleotide with phosphorothioate linkage
  modified_base 3: mod_base = OTHER; note = 2'-O-methyl modified nucleotide with phosphorothioate linkage
  modified_base 111: mod_base = OTHER; note = Nucleotide with phosphorothioate linkage
  modified_base 112: mod_base = OTHER; note = 2'-O-methyl modified nucleotide with phosphorothioate linkage
  modified_base 113: mod_base = OTHER; note = 2'-O-methyl modified nucleotide with phosphorothioate linkage
  modified_base 114: mod_base = OTHER; note = 2'-O-methyl modified nucleotide

SEQ ID NO: 28979 - RNA, 113 nt, synthetic construct; identical to SEQ ID NO: 28417
  source 1..113: mol_type = other RNA
  modified_base 1: mod_base = OTHER; note = 2'-O-methyl modified nucleotide with phosphorothioate linkage
  modified_base 2: mod_base = OTHER; note = 2'-O-methyl modified nucleotide with phosphorothioate linkage
  modified_base 3: mod_base = OTHER; note = 2'-O-methyl modified nucleotide with phosphorothioate linkage
  modified_base 110: mod_base = OTHER; note = Nucleotide with phosphorothioate linkage
  modified_base 111: mod_base = OTHER; note = 2'-O-methyl modified nucleotide with phosphorothioate linkage
  modified_base 112: mod_base = OTHER; note = 2'-O-methyl modified nucleotide with phosphorothioate linkage
  modified_base 113: mod_base = OTHER; note = 2'-O-methyl modified nucleotide

SEQ ID NO: 28980 - RNA, 112 nt, synthetic construct; identical to SEQ ID NO: 28418
  source 1..112: mol_type = other RNA
  modified_base 1: mod_base = OTHER; note = 2'-O-methyl modified nucleotide with phosphorothioate linkage
  modified_base 2: mod_base = OTHER; note = 2'-O-methyl modified nucleotide with phosphorothioate linkage
  modified_base 3: mod_base = OTHER; note = 2'-O-methyl modified nucleotide with phosphorothioate linkage
  modified_base 109: mod_base = OTHER; note = Nucleotide with phosphorothioate linkage
  modified_base 110: mod_base = OTHER; note = 2'-O-methyl modified nucleotide with phosphorothioate linkage
  modified_base 111: mod_base = OTHER; note = 2'-O-methyl modified nucleotide with phosphorothioate linkage
  modified_base 112: mod_base = OTHER; note = 2'-O-methyl modified nucleotide

SEQ ID NO: 28981 - RNA, 111 nt, synthetic construct; identical to SEQ ID NO: 28419
  source 1..111: mol_type = other RNA
  modified_base 1: mod_base = OTHER; note = 2'-O-methyl modified nucleotide with phosphorothioate linkage
  modified_base 2: mod_base = OTHER; note = 2'-O-methyl modified nucleotide with phosphorothioate linkage
  modified_base 3: mod_base = OTHER; note = 2'-O-methyl modified nucleotide with phosphorothioate linkage
  modified_base 108: mod_base = OTHER; note = Nucleotide with phosphorothioate linkage
  modified_base 109: mod_base = OTHER; note = 2'-O-methyl modified nucleotide with phosphorothioate linkage
  modified_base 110: mod_base = OTHER; note = 2'-O-methyl modified nucleotide with phosphorothioate linkage
  modified_base 111: mod_base = OTHER; note = 2'-O-methyl modified nucleotide

SEQ ID NO: 28982 - RNA, 110 nt, synthetic construct; identical to SEQ ID NO: 28420
  source 1..110: mol_type = other RNA
  modified_base 1: mod_base = OTHER; note = 2'-O-methyl modified nucleotide with phosphorothioate linkage
  modified_base 2: mod_base = OTHER; note = 2'-O-methyl modified nucleotide with phosphorothioate linkage
  modified_base 3: mod_base = OTHER; note = 2'-O-methyl modified nucleotide with phosphorothioate linkage
  modified_base 107: mod_base = OTHER; note = Nucleotide with phosphorothioate linkage
  modified_base 108: mod_base = OTHER; note = 2'-O-methyl modified nucleotide with phosphorothioate linkage
  modified_base 109: mod_base = OTHER; note = 2'-O-methyl modified nucleotide with phosphorothioate linkage
  modified_base 110: mod_base = OTHER; note = 2'-O-methyl modified nucleotide

SEQ ID NO: 28983 - RNA, 109 nt, synthetic construct; identical to SEQ ID NO: 28421
  source 1..109: mol_type = other RNA
  modified_base 1: mod_base = OTHER; note = 2'-O-methyl modified nucleotide with phosphorothioate linkage
  modified_base 2: mod_base = OTHER; note = 2'-O-methyl modified nucleotide with phosphorothioate linkage
  modified_base 3: mod_base = OTHER; note = 2'-O-methyl modified nucleotide with phosphorothioate linkage
  modified_base 106: mod_base = OTHER; note = Nucleotide with phosphorothioate linkage
  modified_base 107: mod_base = OTHER; note = 2'-O-methyl modified nucleotide with phosphorothioate linkage
  modified_base 108: mod_base = OTHER; note = 2'-O-methyl modified nucleotide with phosphorothioate linkage
  modified_base 109: mod_base = OTHER; note = 2'-O-methyl modified nucleotide

SEQ ID NO: 28984 - RNA, 108 nt, synthetic construct; identical to SEQ ID NO: 28422
  source 1..108: mol_type = other RNA
  modified_base 1: mod_base = OTHER; note = 2'-O-methyl modified nucleotide with phosphorothioate linkage
  modified_base 2: mod_base = OTHER; note = 2'-O-methyl modified nucleotide with phosphorothioate linkage
  modified_base 3: mod_base = OTHER; note = 2'-O-methyl modified nucleotide with phosphorothioate linkage
  modified_base 105: mod_base = OTHER; note = Nucleotide with phosphorothioate linkage
  modified_base 106: mod_base = OTHER; note = 2'-O-methyl modified nucleotide with phosphorothioate linkage
  modified_base 107: mod_base = OTHER; note = 2'-O-methyl modified nucleotide with phosphorothioate linkage
  modified_base 108: mod_base = OTHER; note = 2'-O-methyl modified nucleotide

SEQ ID NO: 28985 - RNA, 107 nt, synthetic construct; identical to SEQ ID NO: 28423
  source 1..107: mol_type = other RNA
  modified_base 1: mod_base = OTHER; note = 2'-O-methyl modified nucleotide with phosphorothioate linkage
  modified_base 2: mod_base = OTHER; note = 2'-O-methyl modified nucleotide with phosphorothioate linkage
  modified_base 3: mod_base = OTHER; note = 2'-O-methyl modified nucleotide with phosphorothioate linkage
  modified_base 104: mod_base = OTHER; note = Nucleotide with phosphorothioate linkage
  modified_base 105: mod_base = OTHER; note = 2'-O-methyl modified nucleotide with phosphorothioate linkage
  modified_base 106: mod_base = OTHER; note = 2'-O-methyl modified nucleotide with phosphorothioate linkage
  modified_base 107: mod_base = OTHER; note = 2'-O-methyl modified nucleotide

SEQ ID NO: 28986 - RNA, 106 nt, synthetic construct; identical to SEQ ID NO: 28424
  source 1..106: mol_type = other RNA
  modified_base 1: mod_base = OTHER; note = 2'-O-methyl modified nucleotide with phosphorothioate linkage
  modified_base 2: mod_base = OTHER; note = 2'-O-methyl modified nucleotide with phosphorothioate linkage
  modified_base 3: mod_base = OTHER; note = 2'-O-methyl modified nucleotide with phosphorothioate linkage
  modified_base 103: mod_base = OTHER; note = Nucleotide with phosphorothioate linkage
  modified_base 104: mod_base = OTHER; note = 2'-O-methyl modified nucleotide with phosphorothioate linkage
  modified_base 105: mod_base = OTHER; note = 2'-O-methyl modified nucleotide with phosphorothioate linkage
  modified_base 106: mod_base = OTHER; note = 2'-O-methyl modified nucleotide

SEQ ID NO: 28987 - RNA, 105 nt, synthetic construct; identical to SEQ ID NO: 28425
  source 1..105: mol_type = other RNA
  modified_base 1: mod_base = OTHER; note = 2'-O-methyl modified nucleotide with phosphorothioate linkage
  modified_base 2: mod_base = OTHER; note = 2'-O-methyl modified nucleotide with phosphorothioate linkage
  modified_base 3: mod_base = OTHER; note = 2'-O-methyl modified nucleotide with phosphorothioate linkage
  modified_base 102: mod_base = OTHER; note = Nucleotide with phosphorothioate linkage
  modified_base 103: mod_base = OTHER; note = 2'-O-methyl modified nucleotide with phosphorothioate linkage
  modified_base 104: mod_base = OTHER; note = 2'-O-methyl modified nucleotide with phosphorothioate linkage
  modified_base 105: mod_base = OTHER; note = 2'-O-methyl modified nucleotide

SEQ ID NO: 28988 - RNA, 104 nt, synthetic construct; identical to SEQ ID NO: 28426
  source 1..104: mol_type = other RNA
  modified_base 1: mod_base = OTHER; note = 2'-O-methyl modified nucleotide with phosphorothioate linkage
  modified_base 2: mod_base = OTHER; note = 2'-O-methyl modified nucleotide with phosphorothioate linkage
  modified_base 3: mod_base = OTHER; note = 2'-O-methyl modified nucleotide with phosphorothioate linkage
  modified_base 101: mod_base = OTHER; note = Nucleotide with phosphorothioate linkage
  modified_base 102: mod_base = OTHER; note = 2'-O-methyl modified nucleotide with phosphorothioate linkage
  modified_base 103: mod_base = OTHER; note = 2'-O-methyl modified nucleotide with phosphorothioate linkage
  modified_base 104: mod_base = OTHER; note = 2'-O-methyl modified nucleotide

SEQ ID NO: 28989 - RNA, 103 nt, synthetic construct; identical to SEQ ID NO: 28427
  source 1..103: mol_type = other RNA
  modified_base 1: mod_base = OTHER; note = 2'-O-methyl modified nucleotide with phosphorothioate linkage
  modified_base 2: mod_base = OTHER; note = 2'-O-methyl modified nucleotide with phosphorothioate linkage
  modified_base 3: mod_base = OTHER; note = 2'-O-methyl modified nucleotide with phosphorothioate linkage
  modified_base 100: mod_base = OTHER; note = Nucleotide with phosphorothioate linkage
  modified_base 101: mod_base = OTHER; note = 2'-O-methyl modified nucleotide with phosphorothioate linkage
  modified_base 102: mod_base = OTHER; note = 2'-O-methyl modified nucleotide with phosphorothioate linkage
  modified_base 103: mod_base = OTHER; note = 2'-O-methyl modified nucleotide

SEQ ID NO: 28990 - RNA, 115 nt, synthetic construct; identical to SEQ ID NO: 28428
  source 1..115: mol_type = other RNA
  modified_base 1: mod_base = OTHER; note = 2'-O-methyl modified nucleotide with phosphorothioate linkage
  modified_base 2: mod_base = OTHER; note = 2'-O-methyl modified nucleotide with phosphorothioate linkage
  modified_base 3: mod_base = OTHER; note = 2'-O-methyl modified nucleotide with phosphorothioate linkage
  modified_base 112: mod_base = OTHER; note = Nucleotide with phosphorothioate linkage
  modified_base 113: mod_base = OTHER; note = 2'-O-methyl modified nucleotide with phosphorothioate linkage
  modified_base 114: mod_base = OTHER; note = 2'-O-methyl modified nucleotide with phosphorothioate linkage
  modified_base 115: mod_base = OTHER; note = 2'-O-methyl modified nucleotide

SEQ ID NO: 28991 - RNA, 114 nt, synthetic construct; identical to SEQ ID NO: 28429
  source 1..114: mol_type = other RNA
  modified_base 1: mod_base = OTHER; note = 2'-O-methyl modified nucleotide with phosphorothioate linkage
  modified_base 2: mod_base = OTHER; note = 2'-O-methyl modified nucleotide with phosphorothioate linkage
  modified_base 3: mod_base = OTHER; note = 2'-O-methyl modified nucleotide with phosphorothioate linkage
  modified_base 111: mod_base = OTHER; note = Nucleotide with phosphorothioate linkage
  modified_base 112: mod_base = OTHER; note = 2'-O-methyl modified nucleotide with phosphorothioate linkage
  modified_base 113: mod_base = OTHER; note = 2'-O-methyl modified nucleotide with phosphorothioate linkage
  modified_base 114: mod_base = OTHER; note = 2'-O-methyl modified nucleotide

SEQ ID NO: 28992 - RNA, 113 nt, synthetic construct; identical to SEQ ID NO: 28430
  source 1..113: mol_type = other RNA
  modified_base 1: mod_base = OTHER; note = 2'-O-methyl modified nucleotide with phosphorothioate linkage
  modified_base 2: mod_base = OTHER; note = 2'-O-methyl modified nucleotide with phosphorothioate linkage
  modified_base 3: mod_base = OTHER; note = 2'-O-methyl modified nucleotide with phosphorothioate linkage
  modified_base 110: mod_base = OTHER; note = Nucleotide with phosphorothioate linkage
  modified_base 111: mod_base = OTHER; note = 2'-O-methyl modified nucleotide with phosphorothioate linkage
  modified_base 112: mod_base = OTHER; note = 2'-O-methyl modified nucleotide with phosphorothioate linkage
  modified_base 113: mod_base = OTHER; note = 2'-O-methyl modified nucleotide

SEQ ID NO: 28993 - RNA, 112 nt, synthetic construct; identical to SEQ ID NO: 28431
  source 1..112: mol_type = other RNA
  modified_base 1: mod_base = OTHER; note = 2'-O-methyl modified nucleotide with phosphorothioate linkage
  modified_base 2: mod_base = OTHER; note = 2'-O-methyl modified nucleotide with phosphorothioate linkage
  modified_base 3: mod_base = OTHER; note = 2'-O-methyl modified nucleotide with phosphorothioate linkage
  modified_base 109: mod_base = OTHER; note = Nucleotide with phosphorothioate linkage
  modified_base 110: mod_base = OTHER; note = 2'-O-methyl modified nucleotide with phosphorothioate linkage
  modified_base 111: mod_base = OTHER; note = 2'-O-methyl modified nucleotide with phosphorothioate linkage
  modified_base 112: mod_base = OTHER; note = 2'-O-methyl modified nucleotide

SEQ ID NO: 28994 - RNA, 111 nt, synthetic construct; identical to SEQ ID NO: 28432
  source 1..111: mol_type = other RNA
  modified_base 1: mod_base = OTHER; note = 2'-O-methyl modified nucleotide with phosphorothioate linkage
  modified_base 2: mod_base = OTHER; note = 2'-O-methyl modified nucleotide with phosphorothioate linkage
  modified_base 3: mod_base = OTHER; note = 2'-O-methyl modified nucleotide with phosphorothioate linkage
  modified_base 108: mod_base = OTHER; note = Nucleotide with phosphorothioate linkage
  modified_base 109: mod_base = OTHER; note = 2'-O-methyl modified nucleotide with phosphorothioate linkage
  modified_base 110: mod_base = OTHER; note = 2'-O-methyl modified nucleotide with phosphorothioate linkage
  modified_base 111: mod_base = OTHER; note = 2'-O-methyl modified nucleotide

SEQ ID NO: 28995 - RNA, 110 nt, synthetic construct; identical to SEQ ID NO: 28433
  source 1..110: mol_type = other RNA
  modified_base 1: mod_base = OTHER; note = 2'-O-methyl modified nucleotide with phosphorothioate linkage
  modified_base 2: mod_base = OTHER; note = 2'-O-methyl modified nucleotide with phosphorothioate linkage
  modified_base 3: mod_base = OTHER; note = 2'-O-methyl modified nucleotide with phosphorothioate linkage
  modified_base 107: mod_base = OTHER; note = Nucleotide with phosphorothioate linkage
  modified_base 108: mod_base = OTHER; note = 2'-O-methyl modified nucleotide with phosphorothioate linkage
  modified_base 109: mod_base = OTHER; note = 2'-O-methyl modified nucleotide with phosphorothioate linkage
  modified_base 110: mod_base = OTHER; note = 2'-O-methyl modified nucleotide

SEQ ID NO: 28996 - RNA, 109 nt, synthetic construct; identical to SEQ ID NO: 28434
  source 1..109: mol_type = other RNA
  modified_base 1: mod_base = OTHER; note = 2'-O-methyl modified nucleotide with phosphorothioate linkage
  modified_base 2: mod_base = OTHER; note = 2'-O-methyl modified nucleotide with phosphorothioate linkage
  modified_base 3: mod_base = OTHER; note = 2'-O-methyl modified nucleotide with phosphorothioate linkage
  modified_base 106: mod_base = OTHER; note = Nucleotide with phosphorothioate linkage
  modified_base 107: mod_base = OTHER; note = 2'-O-methyl modified nucleotide with phosphorothioate linkage
  modified_base 108: mod_base = OTHER; note = 2'-O-methyl modified nucleotide with phosphorothioate linkage
  modified_base 109: mod_base = OTHER; note = 2'-O-methyl modified nucleotide

SEQ ID NO: 28997 - RNA, 108 nt, synthetic construct; identical to SEQ ID NO: 28435
  source 1..108: mol_type = other RNA
  modified_base 1: mod_base = OTHER; note = 2'-O-methyl modified nucleotide with phosphorothioate linkage
  modified_base 2: mod_base = OTHER; note = 2'-O-methyl modified nucleotide with phosphorothioate linkage
  modified_base 3: mod_base = OTHER; note = 2'-O-methyl modified nucleotide with phosphorothioate linkage
  modified_base 105: mod_base = OTHER; note = Nucleotide with phosphorothioate linkage
  modified_base 106: mod_base = OTHER; note = 2'-O-methyl modified nucleotide with phosphorothioate linkage
  modified_base 107: mod_base = OTHER; note = 2'-O-methyl modified nucleotide with phosphorothioate linkage
  modified_base 108: mod_base = OTHER; note = 2'-O-methyl modified nucleotide

SEQ ID NO: 28998 - RNA, 107 nt, synthetic construct; identical to SEQ ID NO: 28436
  source 1..107: mol_type = other RNA
  modified_base 1: mod_base = OTHER; note = 2'-O-methyl modified nucleotide with phosphorothioate linkage
  modified_base 2: mod_base = OTHER; note = 2'-O-methyl modified nucleotide with phosphorothioate linkage
  modified_base 3: mod_base = OTHER; note = 2'-O-methyl modified nucleotide with phosphorothioate linkage
  modified_base 104: mod_base = OTHER; note = Nucleotide with phosphorothioate linkage
  modified_base 105: mod_base = OTHER; note = 2'-O-methyl modified nucleotide with phosphorothioate linkage
  modified_base 106: mod_base = OTHER; note = 2'-O-methyl modified nucleotide with phosphorothioate linkage
  modified_base 107: mod_base = OTHER; note = 2'-O-methyl modified nucleotide

SEQ ID NO: 28999 - RNA, 106 nt, synthetic construct; identical to SEQ ID NO: 28437
  source 1..106: mol_type = other RNA
  modified_base 1: mod_base = OTHER; note = 2'-O-methyl modified nucleotide with phosphorothioate linkage
  modified_base 2: mod_base = OTHER; note = 2'-O-methyl modified nucleotide with phosphorothioate linkage
  modified_base 3: mod_base = OTHER; note = 2'-O-methyl modified nucleotide with phosphorothioate linkage
  modified_base 103: mod_base = OTHER; note = Nucleotide with phosphorothioate linkage
  modified_base 104: mod_base = OTHER; note = 2'-O-methyl modified nucleotide with phosphorothioate linkage
  modified_base 105: mod_base = OTHER; note = 2'-O-methyl modified nucleotide with phosphorothioate linkage
  modified_base 106: mod_base = OTHER; note = 2'-O-methyl modified nucleotide

SEQ ID NO: 29000 - RNA, 105 nt, synthetic construct; identical to SEQ ID NO: 28438
  source 1..105: mol_type = other RNA
  modified_base 1: mod_base = OTHER; note = 2'-O-methyl modified nucleotide with phosphorothioate linkage
  modified_base 2: mod_base = OTHER; note = 2'-O-methyl modified nucleotide with phosphorothioate linkage
  modified_base 3: mod_base = OTHER; note = 2'-O-methyl modified nucleotide with phosphorothioate linkage
  modified_base 102: mod_base = OTHER; note = Nucleotide with phosphorothioate linkage
  modified_base 103: mod_base = OTHER; note = 2'-O-methyl modified nucleotide with phosphorothioate linkage
  modified_base 104: mod_base = OTHER; note = 2'-O-methyl modified nucleotide with phosphorothioate linkage
  modified_base 105: mod_base = OTHER; note = 2'-O-methyl modified nucleotide

SEQ ID NO: 29001 - RNA, 104 nt, synthetic construct; identical to SEQ ID NO: 28439
  source 1..104: mol_type = other RNA
  modified_base 1: mod_base = OTHER; note = 2'-O-methyl modified nucleotide with phosphorothioate linkage
  modified_base 2: mod_base = OTHER; note = 2'-O-methyl modified nucleotide with phosphorothioate linkage
  modified_base 3: mod_base = OTHER; note = 2'-O-methyl modified nucleotide with phosphorothioate linkage
  modified_base 101: mod_base = OTHER; note = Nucleotide with phosphorothioate linkage
  modified_base 102: mod_base = OTHER; note = 2'-O-methyl modified nucleotide with phosphorothioate linkage
  modified_base 103: mod_base = OTHER; note = 2'-O-methyl modified nucleotide with phosphorothioate linkage
  modified_base 104: mod_base = OTHER; note = 2'-O-methyl modified nucleotide

SEQ ID NO: 29002 - RNA, 116 nt, synthetic construct; identical to SEQ ID NO: 28440
  source 1..116: mol_type = other RNA
  modified_base 1: mod_base = OTHER; note = 2'-O-methyl modified nucleotide with phosphorothioate linkage
  modified_base 2: mod_base = OTHER; note = 2'-O-methyl modified nucleotide with phosphorothioate linkage
  modified_base 3: mod_base = OTHER; note = 2'-O-methyl modified nucleotide with phosphorothioate linkage
  modified_base 113: mod_base = OTHER; note = Nucleotide with phosphorothioate linkage
  modified_base 114: mod_base = OTHER; note = 2'-O-methyl modified nucleotide with phosphorothioate linkage
  modified_base 115: mod_base = OTHER; note = 2'-O-methyl modified nucleotide with phosphorothioate linkage
  modified_base 116: mod_base = OTHER; note = 2'-O-methyl modified nucleotide

SEQ ID NO: 29003 - RNA, 115 nt, synthetic construct; identical to SEQ ID NO: 28441
  source 1..115: mol_type = other RNA
  modified_base 1: mod_base = OTHER; note = 2'-O-methyl modified nucleotide with phosphorothioate linkage
  modified_base 2: mod_base = OTHER; note = 2'-O-methyl modified nucleotide with phosphorothioate linkage
  modified_base 3: mod_base = OTHER; note = 2'-O-methyl modified nucleotide with phosphorothioate linkage
  modified_base 112: mod_base = OTHER; note = Nucleotide with phosphorothioate linkage
  modified_base 113: mod_base = OTHER; note = 2'-O-methyl modified nucleotide with phosphorothioate linkage
  modified_base 114: mod_base = OTHER; note = 2'-O-methyl modified nucleotide with phosphorothioate linkage
  modified_base 115: mod_base = OTHER; note = 2'-O-methyl modified nucleotide

SEQ ID NO: 29004 - RNA, 114 nt, synthetic construct; identical to SEQ ID NO: 28442
  source 1..114: mol_type = other RNA
  modified_base 1: mod_base = OTHER; note = 2'-O-methyl modified nucleotide with phosphorothioate linkage
  modified_base 2: mod_base = OTHER; note = 2'-O-methyl modified nucleotide with phosphorothioate linkage
  modified_base 3: mod_base = OTHER; note = 2'-O-methyl modified nucleotide with phosphorothioate linkage
  modified_base 111: mod_base = OTHER; note = Nucleotide with phosphorothioate linkage
  modified_base 112: mod_base = OTHER; note = 2'-O-methyl modified nucleotide with phosphorothioate linkage
  modified_base 113: mod_base = OTHER; note = 2'-O-methyl modified nucleotide with phosphorothioate linkage
  modified_base 114: mod_base = OTHER; note = 2'-O-methyl modified nucleotide

SEQ ID NO: 29005 - RNA, 113 nt, synthetic construct; identical to SEQ ID NO: 28443
  source 1..113: mol_type = other RNA
  modified_base 1: mod_base = OTHER; note = 2'-O-methyl modified nucleotide with phosphorothioate linkage
  modified_base 2: mod_base = OTHER; note = 2'-O-methyl modified nucleotide with phosphorothioate linkage
  modified_base 3: mod_base = OTHER; note = 2'-O-methyl modified nucleotide with phosphorothioate linkage
  modified_base 110: mod_base = OTHER; note = Nucleotide with phosphorothioate linkage
  modified_base 111: mod_base = OTHER; note = 2'-O-methyl modified nucleotide with phosphorothioate linkage
  modified_base 112: mod_base = OTHER; note = 2'-O-methyl modified nucleotide with phosphorothioate linkage
  modified_base 113: mod_base = OTHER; note = 2'-O-methyl modified nucleotide

SEQ ID NO: 29006 - RNA, 112 nt, synthetic construct; identical to SEQ ID NO: 28444
  source 1..112: mol_type = other RNA
  modified_base 1: mod_base = OTHER; note = 2'-O-methyl modified nucleotide with phosphorothioate linkage
  modified_base 2: mod_base = OTHER; note = 2'-O-methyl modified nucleotide with phosphorothioate linkage
  modified_base 3: mod_base = OTHER; note = 2'-O-methyl modified nucleotide with phosphorothioate linkage
  modified_base 109: mod_base = OTHER; note = Nucleotide with phosphorothioate linkage
  modified_base 110: mod_base = OTHER; note = 2'-O-methyl modified nucleotide with phosphorothioate linkage
  modified_base 111: mod_base = OTHER; note = 2'-O-methyl modified nucleotide with phosphorothioate linkage
  modified_base 112: mod_base = OTHER; note = 2'-O-methyl modified nucleotide

SEQ ID NO: 29007 - RNA, 111 nt, synthetic construct; identical to SEQ ID NO: 28445
  source 1..111: mol_type = other RNA
  modified_base 1: mod_base = OTHER; note = 2'-O-methyl modified nucleotide with phosphorothioate linkage
  modified_base 2: mod_base = OTHER; note = 2'-O-methyl modified nucleotide with phosphorothioate linkage
  modified_base 3: mod_base = OTHER; note = 2'-O-methyl modified nucleotide with phosphorothioate linkage
  modified_base 108: mod_base = OTHER; note = Nucleotide with phosphorothioate linkage
  modified_base 109: mod_base = OTHER; note = 2'-O-methyl modified nucleotide with phosphorothioate linkage
  modified_base 110: mod_base = OTHER; note = 2'-O-methyl modified nucleotide with phosphorothioate linkage
  modified_base 111: mod_base = OTHER; note = 2'-O-methyl modified nucleotide

SEQ ID NO: 29008 - RNA, 110 nt, synthetic construct; identical to SEQ ID NO: 28446
  source 1..110: mol_type = other RNA
  modified_base 1: mod_base = OTHER; note = 2'-O-methyl modified nucleotide with phosphorothioate linkage
  modified_base 2: mod_base = OTHER; note = 2'-O-methyl modified nucleotide with phosphorothioate linkage
  modified_base 3: mod_base = OTHER; note = 2'-O-methyl modified nucleotide with phosphorothioate linkage
  modified_base 107: mod_base = OTHER; note = Nucleotide with phosphorothioate linkage
  modified_base 108: mod_base = OTHER; note = 2'-O-methyl modified nucleotide with phosphorothioate linkage
  modified_base 109: mod_base = OTHER; note = 2'-O-methyl modified nucleotide with phosphorothioate linkage
  modified_base 110: mod_base = OTHER; note = 2'-O-methyl modified nucleotide

SEQ ID NO: 29009 - RNA, 109 nt, synthetic construct; identical to SEQ ID NO: 28447
  source 1..109: mol_type = other RNA
  modified_base 1: mod_base = OTHER; note = 2'-O-methyl modified nucleotide with phosphorothioate linkage
  modified_base 2: mod_base = OTHER; note = 2'-O-methyl modified nucleotide with phosphorothioate linkage
  modified_base 3: mod_base = OTHER; note = 2'-O-methyl modified nucleotide with phosphorothioate linkage
  modified_base 106: mod_base = OTHER; note = Nucleotide with phosphorothioate linkage
  modified_base 107: mod_base = OTHER; note = 2'-O-methyl modified nucleotide with phosphorothioate linkage
  modified_base 108: mod_base = OTHER; note = 2'-O-methyl modified nucleotide with phosphorothioate linkage
  modified_base 109: mod_base = OTHER; note = 2'-O-methyl modified nucleotide

SEQ ID NO: 29010 - RNA, 108 nt, synthetic construct; identical to SEQ ID NO: 28448
  source 1..108: mol_type = other RNA
  modified_base 1: mod_base = OTHER; note = 2'-O-methyl modified nucleotide with phosphorothioate linkage
  modified_base 2: mod_base = OTHER; note = 2'-O-methyl modified nucleotide with phosphorothioate linkage
  modified_base 3: mod_base = OTHER; note = 2'-O-methyl modified nucleotide with phosphorothioate linkage
  modified_base 105: mod_base = OTHER; note = Nucleotide with phosphorothioate linkage
  modified_base 106: mod_base = OTHER; note = 2'-O-methyl modified nucleotide with phosphorothioate linkage
  modified_base 107: mod_base = OTHER; note = 2'-O-methyl modified nucleotide with phosphorothioate linkage
  modified_base 108: mod_base = OTHER; note = 2'-O-methyl modified nucleotide

SEQ ID NO: 29011 - RNA, 107 nt, synthetic construct; identical to SEQ ID NO: 28449
  source 1..107: mol_type = other RNA
  modified_base 1: mod_base = OTHER; note = 2'-O-methyl modified nucleotide with phosphorothioate linkage
  modified_base 2: mod_base = OTHER; note = 2'-O-methyl modified nucleotide with phosphorothioate linkage
  modified_base 3: mod_base = OTHER; note = 2'-O-methyl modified nucleotide with phosphorothioate linkage
  modified_base 104: mod_base = OTHER; note = Nucleotide with phosphorothioate linkage
  modified_base 105: mod_base = OTHER; note = 2'-O-methyl modified nucleotide with phosphorothioate linkage
  modified_base 106: mod_base = OTHER; note = 2'-O-methyl modified nucleotide with phosphorothioate linkage
  modified_base 107: mod_base = OTHER; note = 2'-O-methyl modified nucleotide

SEQ ID NO: 29012 - RNA, 106 nt, synthetic construct; identical to SEQ ID NO: 28450
  source 1..106: mol_type = other RNA
  modified_base 1: mod_base = OTHER; note = 2'-O-methyl modified nucleotide with phosphorothioate linkage
  modified_base 2: mod_base = OTHER; note = 2'-O-methyl modified nucleotide with phosphorothioate linkage
  modified_base 3: mod_base = OTHER; note = 2'-O-methyl modified nucleotide with phosphorothioate linkage
  modified_base 103: mod_base = OTHER; note = Nucleotide with phosphorothioate linkage
  modified_base 104: mod_base = OTHER; note = 2'-O-methyl modified nucleotide with phosphorothioate linkage
  modified_base 105: mod_base = OTHER; note = 2'-O-methyl modified nucleotide with phosphorothioate linkage
  modified_base 106: mod_base = OTHER; note = 2'-O-methyl modified nucleotide

SEQ ID NO: 29013 - RNA, 105 nt, synthetic construct; identical to SEQ ID NO: 28451
  source 1..105: mol_type = other RNA
  modified_base 1: mod_base = OTHER; note = 2'-O-methyl modified nucleotide with phosphorothioate linkage
  modified_base 2: mod_base = OTHER; note = 2'-O-methyl modified nucleotide with phosphorothioate linkage
  modified_base 3: mod_base = OTHER; note = 2'-O-methyl modified nucleotide with phosphorothioate linkage
  modified_base 102: mod_base = OTHER; note = Nucleotide with phosphorothioate linkage
  modified_base 103: mod_base = OTHER; note = 2'-O-methyl modified nucleotide with phosphorothioate linkage
  modified_base 104: mod_base = OTHER; note = 2'-O-methyl modified nucleotide with phosphorothioate linkage
  modified_base 105: mod_base = OTHER; note = 2'-O-methyl modified nucleotide

SEQ ID NO: 29014 - RNA, 117 nt, synthetic construct; identical to SEQ ID NO: 28452
  source 1..117: mol_type = other RNA
  modified_base 1: mod_base = OTHER; note = 2'-O-methyl modified nucleotide with phosphorothioate linkage
  modified_base 2: mod_base = OTHER; note = 2'-O-methyl modified nucleotide with phosphorothioate linkage
  modified_base 3: mod_base = OTHER; note = 2'-O-methyl modified nucleotide with phosphorothioate linkage
  modified_base 114: mod_base = OTHER; note = Nucleotide with phosphorothioate linkage
  modified_base 115: mod_base = OTHER; note = 2'-O-methyl modified nucleotide with phosphorothioate linkage
  modified_base 116: mod_base = OTHER; note = 2'-O-methyl modified nucleotide with phosphorothioate linkage
  modified_base 117: mod_base = OTHER; note = 2'-O-methyl modified nucleotide

SEQ ID NO: 29015 - RNA, 116 nt, synthetic construct; identical to SEQ ID NO: 28453
  source 1..116: mol_type = other RNA
  modified_base 1: mod_base = OTHER; note = 2'-O-methyl modified nucleotide with phosphorothioate linkage
  modified_base 2: mod_base = OTHER; note = 2'-O-methyl modified nucleotide with phosphorothioate linkage
  modified_base 3: mod_base = OTHER; note = 2'-O-methyl modified nucleotide with phosphorothioate linkage
  modified_base 113: mod_base = OTHER; note = Nucleotide with phosphorothioate linkage
  modified_base 114: mod_base = OTHER; note = 2'-O-methyl modified nucleotide with phosphorothioate linkage
  modified_base 115: mod_base = OTHER; note = 2'-O-methyl modified nucleotide with phosphorothioate linkage
  modified_base 116: mod_base = OTHER; note = 2'-O-methyl modified nucleotide

SEQ ID NO: 29016 - RNA, 115 nt, synthetic construct; identical to SEQ ID NO: 28454
  source 1..115: mol_type = other RNA
  modified_base 1: mod_base = OTHER; note = 2'-O-methyl modified nucleotide with phosphorothioate linkage
  modified_base 2: mod_base = OTHER; note = 2'-O-methyl modified nucleotide with phosphorothioate linkage
  modified_base 3: mod_base = OTHER; note = 2'-O-methyl modified nucleotide with phosphorothioate linkage
  modified_base 112: mod_base = OTHER; note = Nucleotide with phosphorothioate linkage
  modified_base 113: mod_base = OTHER; note = 2'-O-methyl modified nucleotide with phosphorothioate linkage
  modified_base 114: mod_base = OTHER; note = 2'-O-methyl modified nucleotide with phosphorothioate linkage
  modified_base 115: mod_base = OTHER; note = 2'-O-methyl modified nucleotide

SEQ ID NO: 29017 - RNA, 114 nt, synthetic construct; identical to SEQ ID NO: 28455
  source 1..114: mol_type = other RNA
  modified_base 1: mod_base = OTHER; note = 2'-O-methyl modified nucleotide with phosphorothioate linkage
  modified_base 2: mod_base = OTHER; note = 2'-O-methyl modified nucleotide with phosphorothioate linkage
  modified_base 3: mod_base = OTHER; note = 2'-O-methyl modified nucleotide with phosphorothioate linkage
  modified_base 111: mod_base = OTHER; note = Nucleotide with phosphorothioate linkage
  modified_base 112: mod_base = OTHER; note = 2'-O-methyl modified nucleotide with phosphorothioate linkage
  modified_base 113: mod_base = OTHER; note = 2'-O-methyl modified nucleotide with phosphorothioate linkage
  modified_base 114: mod_base = OTHER; note = 2'-O-methyl modified nucleotide

SEQ ID NO: 29018 - RNA, 113 nt, synthetic construct; identical to SEQ ID NO: 28456
  source 1..113: mol_type = other RNA
  modified_base 1: mod_base = OTHER; note = 2'-O-methyl modified nucleotide with phosphorothioate linkage
  modified_base 2: mod_base = OTHER; note = 2'-O-methyl modified nucleotide with phosphorothioate linkage
  modified_base 3: mod_base = OTHER; note = 2'-O-methyl modified nucleotide with phosphorothioate linkage
  modified_base 110: mod_base = OTHER; note = Nucleotide with phosphorothioate linkage
  modified_base 111: mod_base = OTHER; note = 2'-O-methyl modified nucleotide with phosphorothioate linkage
  modified_base 112: mod_base = OTHER; note = 2'-O-methyl modified nucleotide with phosphorothioate linkage
  modified_base 113: mod_base = OTHER; note = 2'-O-methyl modified nucleotide

SEQ ID NO: 29019 - RNA, 112 nt, synthetic construct; identical to SEQ ID NO: 28457
  source 1..112: mol_type = other RNA
  modified_base 1: mod_base = OTHER; note = 2'-O-methyl modified nucleotide with phosphorothioate linkage
  modified_base 2: mod_base = OTHER; note = 2'-O-methyl modified nucleotide with phosphorothioate linkage
  modified_base 3: mod_base = OTHER; note = 2'-O-methyl modified nucleotide with phosphorothioate linkage
  modified_base 109: mod_base = OTHER; note = Nucleotide with phosphorothioate linkage
  modified_base 110: mod_base = OTHER; note = 2'-O-methyl modified nucleotide with phosphorothioate linkage
  modified_base 111: mod_base = OTHER; note = 2'-O-methyl modified nucleotide with phosphorothioate linkage
  modified_base 112: mod_base = OTHER; note = 2'-O-methyl modified nucleotide

SEQ ID NO: 29020 - RNA, 111 nt, synthetic construct; identical to SEQ ID NO: 28458
  source 1..111: mol_type = other RNA
  modified_base 1: mod_base = OTHER; note = 2'-O-methyl modified nucleotide with phosphorothioate linkage
  modified_base 2: mod_base = OTHER; note = 2'-O-methyl modified nucleotide with phosphorothioate linkage
  modified_base 3: mod_base = OTHER; note = 2'-O-methyl modified nucleotide with phosphorothioate linkage
  modified_base 108: mod_base = OTHER; note = Nucleotide with phosphorothioate linkage
  modified_base 109: mod_base = OTHER; note = 2'-O-methyl modified nucleotide with phosphorothioate linkage
  modified_base 110: mod_base = OTHER; note = 2'-O-methyl modified nucleotide with phosphorothioate linkage
  modified_base 111: mod_base = OTHER; note = 2'-O-methyl modified nucleotide

SEQ ID NO: 29021 - RNA, 110 nt, synthetic construct; identical to SEQ ID NO: 28459
  source 1..110: mol_type = other RNA
  modified_base 1: mod_base = OTHER; note = 2'-O-methyl modified nucleotide with phosphorothioate linkage
  modified_base 2: mod_base = OTHER; note = 2'-O-methyl modified nucleotide with phosphorothioate linkage
  modified_base 3: mod_base = OTHER; note = 2'-O-methyl modified nucleotide with phosphorothioate linkage
  modified_base 107: mod_base = OTHER; note = Nucleotide with phosphorothioate linkage
  modified_base 108: mod_base = OTHER; note = 2'-O-methyl modified nucleotide with phosphorothioate linkage
  modified_base 109: mod_base = OTHER; note = 2'-O-methyl modified nucleotide with phosphorothioate linkage
  modified_base 110: mod_base = OTHER; note = 2'-O-methyl modified nucleotide

SEQ ID NO: 29022 - RNA, 109 nt, synthetic construct; identical to SEQ ID NO: 28460
  source 1..109: mol_type = other RNA
  modified_base 1: mod_base = OTHER; note = 2'-O-methyl modified nucleotide with phosphorothioate linkage
  modified_base 2: mod_base = OTHER; note = 2'-O-methyl modified nucleotide with phosphorothioate linkage
  modified_base 3: mod_base = OTHER; note = 2'-O-methyl modified nucleotide with phosphorothioate linkage
  modified_base 106: mod_base = OTHER; note = Nucleotide with phosphorothioate linkage
  modified_base 107: mod_base = OTHER; note = 2'-O-methyl modified nucleotide with phosphorothioate linkage
  modified_base 108: mod_base = OTHER; note = 2'-O-methyl modified nucleotide with phosphorothioate linkage
  modified_base 109: mod_base = OTHER; note = 2'-O-methyl modified nucleotide

SEQ ID NO: 29023 - RNA, 108 nt, synthetic construct; identical to SEQ ID NO: 28461
  source 1..108: mol_type = other RNA
  modified_base 1: mod_base = OTHER; note = 2'-O-methyl modified nucleotide with phosphorothioate linkage
  modified_base 2: mod_base = OTHER; note = 2'-O-methyl modified nucleotide with phosphorothioate linkage
  modified_base 3: mod_base = OTHER; note = 2'-O-methyl modified nucleotide with phosphorothioate linkage
  modified_base 105: mod_base = OTHER; note = Nucleotide with phosphorothioate linkage
  modified_base 106: mod_base = OTHER; note = 2'-O-methyl modified nucleotide with phosphorothioate linkage
  modified_base 107: mod_base = OTHER; note = 2'-O-methyl modified nucleotide with phosphorothioate linkage
  modified_base 108: mod_base = OTHER; note = 2'-O-methyl modified nucleotide

SEQ ID NO: 29024 - RNA, 107 nt, synthetic construct; identical to SEQ ID NO: 28462
  source 1..107: mol_type = other RNA
  modified_base 1: mod_base = OTHER; note = 2'-O-methyl modified nucleotide with phosphorothioate linkage
  modified_base 2: mod_base = OTHER; note = 2'-O-methyl modified nucleotide with phosphorothioate linkage
  modified_base 3: mod_base = OTHER; note = 2'-O-methyl modified nucleotide with phosphorothioate linkage
  modified_base 104: mod_base = OTHER; note = Nucleotide with phosphorothioate linkage
  modified_base 105: mod_base = OTHER; note = 2'-O-methyl modified nucleotide with phosphorothioate linkage
  modified_base 106: mod_base = OTHER; note = 2'-O-methyl modified nucleotide with phosphorothioate linkage
  modified_base 107: mod_base = OTHER; note = 2'-O-methyl modified nucleotide

SEQ ID NO: 29025 - RNA, 106 nt, synthetic construct; identical to SEQ ID NO: 28463
  source 1..106: mol_type = other RNA
  modified_base 1: mod_base = OTHER; note = 2'-O-methyl modified nucleotide with phosphorothioate linkage
  modified_base 2: mod_base = OTHER; note = 2'-O-methyl modified nucleotide with phosphorothioate linkage
  modified_base 3: mod_base = OTHER; note = 2'-O-methyl modified nucleotide with phosphorothioate linkage
  modified_base 103: mod_base = OTHER; note = Nucleotide with phosphorothioate linkage
  modified_base 104: mod_base = OTHER; note = 2'-O-methyl modified nucleotide with phosphorothioate linkage
  modified_base 105: mod_base = OTHER; note = 2'-O-methyl modified nucleotide with phosphorothioate linkage
  modified_base 106: mod_base = OTHER; note = 2'-O-methyl modified nucleotide

SEQ ID NO: 29026 - RNA, 118 nt, synthetic construct; identical to SEQ ID NO: 28464
  source 1..118: mol_type = other RNA
  modified_base 1: mod_base = OTHER; note = 2'-O-methyl modified nucleotide with phosphorothioate linkage
  modified_base 2: mod_base = OTHER; note = 2'-O-methyl modified nucleotide with phosphorothioate linkage
  modified_base 3: mod_base = OTHER; note = 2'-O-methyl modified nucleotide with phosphorothioate linkage
  modified_base 115: mod_base = OTHER; note = Nucleotide with phosphorothioate linkage
  modified_base 116: mod_base = OTHER; note = 2'-O-methyl modified nucleotide with phosphorothioate linkage
  modified_base 117: mod_base = OTHER; note = 2'-O-methyl modified nucleotide with phosphorothioate linkage
  modified_base 118: mod_base = OTHER; note = 2'-O-methyl modified nucleotide

SEQ ID NO: 29027 - RNA, 117 nt, synthetic construct; identical to SEQ ID NO: 28465
  source 1..117: mol_type = other RNA
  modified_base 1: mod_base = OTHER; note = 2'-O-methyl modified nucleotide with phosphorothioate linkage
  modified_base 2: mod_base = OTHER; note = 2'-O-methyl modified nucleotide with phosphorothioate linkage
  modified_base 3: mod_base = OTHER; note = 2'-O-methyl modified nucleotide with phosphorothioate linkage
  modified_base 114: mod_base = OTHER; note = Nucleotide with phosphorothioate linkage
  modified_base 115: mod_base = OTHER; note = 2'-O-methyl modified nucleotide with phosphorothioate linkage
  modified_base 116: mod_base = OTHER; note = 2'-O-methyl modified nucleotide with phosphorothioate linkage
  modified_base 117: mod_base = OTHER; note = 2'-O-methyl modified nucleotide

SEQ ID NO: 29028 - RNA, 116 nt, synthetic construct; identical to SEQ ID NO: 28466
  source 1..116: mol_type = other RNA
  modified_base 1: mod_base = OTHER; note = 2'-O-methyl modified nucleotide with phosphorothioate linkage
  modified_base 2: mod_base = OTHER; note = 2'-O-methyl modified nucleotide with phosphorothioate linkage
  modified_base 3: mod_base = OTHER; note = 2'-O-methyl modified nucleotide with phosphorothioate linkage
  modified_base 113: mod_base = OTHER; note = Nucleotide with phosphorothioate linkage
  modified_base 114: mod_base = OTHER; note = 2'-O-methyl modified nucleotide with phosphorothioate linkage
  modified_base 115: mod_base = OTHER; note = 2'-O-methyl modified nucleotide with phosphorothioate linkage
  modified_base 116: mod_base = OTHER; note = 2'-O-methyl modified nucleotide

SEQ ID NO: 29029 - RNA, 115 nt, synthetic construct; identical to SEQ ID NO: 28467
  source 1..115: mol_type = other RNA
  modified_base 1: mod_base = OTHER; note = 2'-O-methyl modified nucleotide with phosphorothioate linkage
  modified_base 2: mod_base = OTHER; note = 2'-O-methyl modified nucleotide with phosphorothioate linkage
  modified_base 3: mod_base = OTHER; note = 2'-O-methyl modified nucleotide with phosphorothioate linkage
  modified_base 112: mod_base = OTHER; note = Nucleotide with phosphorothioate linkage
  modified_base 113: mod_base = OTHER; note = 2'-O-methyl modified nucleotide with phosphorothioate linkage
  modified_base 114: mod_base = OTHER; note = 2'-O-methyl modified nucleotide with phosphorothioate linkage
  modified_base 115: mod_base = OTHER; note = 2'-O-methyl modified nucleotide

SEQ ID NO: 29030 - RNA, 114 nt, synthetic construct; identical to SEQ ID NO: 28468
  source 1..114: mol_type = other RNA
  modified_base 1: mod_base = OTHER; note = 2'-O-methyl modified nucleotide with phosphorothioate linkage
  modified_base 2: mod_base = OTHER; note = 2'-O-methyl modified nucleotide with phosphorothioate linkage
  modified_base 3: mod_base = OTHER; note = 2'-O-methyl modified nucleotide with phosphorothioate linkage
  modified_base 111: mod_base = OTHER; note = Nucleotide with phosphorothioate linkage
  modified_base 112: mod_base = OTHER; note = 2'-O-methyl modified nucleotide with phosphorothioate linkage
  modified_base 113: mod_base = OTHER; note = 2'-O-methyl modified nucleotide with phosphorothioate linkage
  modified_base 114: mod_base = OTHER; note = 2'-O-methyl modified nucleotide

SEQ ID NO: 29031 - RNA, 113 nt, synthetic construct; identical to SEQ ID NO: 28469
  source 1..113: mol_type = other RNA
  modified_base 1: mod_base = OTHER; note = 2'-O-methyl modified nucleotide with phosphorothioate linkage
  modified_base 2: mod_base = OTHER; note = 2'-O-methyl modified nucleotide with phosphorothioate linkage
  modified_base 3: mod_base = OTHER; note = 2'-O-methyl modified nucleotide with phosphorothioate linkage
  modified_base 110: mod_base = OTHER; note = Nucleotide with phosphorothioate linkage
  modified_base 111: mod_base = OTHER; note = 2'-O-methyl modified nucleotide with phosphorothioate linkage
  modified_base 112: mod_base = OTHER; note = 2'-O-methyl modified nucleotide with phosphorothioate linkage
  modified_base 113: mod_base = OTHER; note = 2'-O-methyl modified nucleotide

SEQ ID NO: 29032 - RNA, 112 nt, synthetic construct; identical to SEQ ID NO: 28470
  source 1..112: mol_type = other RNA
  modified_base 1: mod_base = OTHER; note = 2'-O-methyl modified nucleotide with phosphorothioate linkage
  modified_base 2: mod_base = OTHER; note = 2'-O-methyl modified nucleotide with phosphorothioate linkage
  modified_base 3: mod_base = OTHER; note = 2'-O-methyl modified nucleotide with phosphorothioate linkage
  modified_base 109: mod_base = OTHER; note = Nucleotide with phosphorothioate linkage
  modified_base 110: mod_base = OTHER; note = 2'-O-methyl modified nucleotide with phosphorothioate linkage
  modified_base 111: mod_base = OTHER; note = 2'-O-methyl modified nucleotide with phosphorothioate linkage
  modified_base 112: mod_base = OTHER; note = 2'-O-methyl modified nucleotide

SEQ ID NO: 29033 - RNA, 111 nt, synthetic construct; identical to SEQ ID NO: 28471
  source 1..111: mol_type = other RNA
  modified_base 1: mod_base = OTHER; note = 2'-O-methyl modified nucleotide with phosphorothioate linkage
  modified_base 2: mod_base = OTHER; note = 2'-O-methyl modified nucleotide with phosphorothioate linkage
  modified_base 3: mod_base = OTHER; note = 2'-O-methyl modified nucleotide with phosphorothioate linkage
  modified_base 108: mod_base = OTHER; note = Nucleotide with phosphorothioate linkage
  modified_base 109: mod_base = OTHER; note = 2'-O-methyl modified nucleotide with phosphorothioate linkage
  modified_base 110: mod_base = OTHER; note = 2'-O-methyl modified nucleotide with phosphorothioate linkage
  modified_base 111: mod_base = OTHER; note = 2'-O-methyl modified nucleotide

SEQ ID NO: 29034 - RNA, 110 nt, synthetic construct; identical to SEQ ID NO: 28472
  source 1..110: mol_type = other RNA
  modified_base 1: mod_base = OTHER; note = 2'-O-methyl modified nucleotide with phosphorothioate linkage
  modified_base 2: mod_base = OTHER; note = 2'-O-methyl modified nucleotide with phosphorothioate linkage
  modified_base 3: mod_base = OTHER; note = 2'-O-methyl modified nucleotide with phosphorothioate linkage
  modified_base 107: mod_base = OTHER; note = Nucleotide with phosphorothioate linkage
  modified_base 108: mod_base = OTHER; note = 2'-O-methyl modified nucleotide with phosphorothioate linkage
  modified_base 109: mod_base = OTHER; note = 2'-O-methyl modified nucleotide with phosphorothioate linkage
  modified_base 110: mod_base = OTHER; note = 2'-O-methyl modified nucleotide

SEQ ID NO: 29035 - RNA, 109 nt, synthetic construct; identical to SEQ ID NO: 28473
  source 1..109: mol_type = other RNA
  modified_base 1: mod_base = OTHER; note = 2'-O-methyl modified nucleotide with phosphorothioate linkage
  modified_base 2: mod_base = OTHER; note = 2'-O-methyl modified nucleotide with phosphorothioate linkage
  modified_base 3: mod_base = OTHER; note = 2'-O-methyl modified nucleotide with phosphorothioate linkage
  modified_base 106: mod_base = OTHER; note = Nucleotide with phosphorothioate linkage
  modified_base 107: mod_base = OTHER; note = 2'-O-methyl modified nucleotide with phosphorothioate linkage
  modified_base 108: mod_base = OTHER; note = 2'-O-methyl modified nucleotide with phosphorothioate linkage
  modified_base 109: mod_base = OTHER; note = 2'-O-methyl modified nucleotide

SEQ ID NO: 29036 - RNA, 108 nt, synthetic construct; identical to SEQ ID NO: 28474
  source 1..108: mol_type = other RNA
  modified_base 1: mod_base = OTHER; note = 2'-O-methyl modified nucleotide with phosphorothioate linkage
  modified_base 2: mod_base = OTHER; note = 2'-O-methyl modified nucleotide with phosphorothioate linkage
  modified_base 3: mod_base = OTHER; note = 2'-O-methyl modified nucleotide with phosphorothioate linkage
  modified_base 105: mod_base = OTHER; note = Nucleotide with phosphorothioate linkage
  modified_base 106: mod_base = OTHER; note = 2'-O-methyl modified nucleotide with phosphorothioate linkage
  modified_base 107: mod_base = OTHER; note = 2'-O-methyl modified nucleotide with phosphorothioate linkage
  modified_base 108: mod_base = OTHER; note = 2'-O-methyl modified nucleotide

SEQ ID NO: 29037 - RNA, 107 nt, synthetic construct; identical to SEQ ID NO: 28475
  source 1..107: mol_type = other RNA
  modified_base 1: mod_base = OTHER; note = 2'-O-methyl modified nucleotide with phosphorothioate linkage
  modified_base 2: mod_base = OTHER; note = 2'-O-methyl modified nucleotide with phosphorothioate linkage
  modified_base 3: mod_base = OTHER; note = 2'-O-methyl modified nucleotide with phosphorothioate linkage
  modified_base 104: mod_base = OTHER; note = Nucleotide with phosphorothioate linkage
  modified_base 105: mod_base = OTHER; note = 2'-O-methyl modified nucleotide with phosphorothioate linkage
  modified_base 106: mod_base = OTHER; note = 2'-O-methyl modified nucleotide with phosphorothioate linkage
  modified_base 107: mod_base = OTHER; note = 2'-O-methyl modified nucleotide

SEQ ID NO: 29038 - RNA, 119 nt, synthetic construct; identical to SEQ ID NO: 28476
  source 1..119: mol_type = other RNA
  modified_base 1: mod_base = OTHER; note = 2'-O-methyl modified nucleotide with phosphorothioate linkage
  modified_base 2: mod_base = OTHER; note = 2'-O-methyl modified nucleotide with phosphorothioate linkage
  modified_base 3: mod_base = OTHER; note = 2'-O-methyl modified nucleotide with phosphorothioate linkage
  modified_base 116: mod_base = OTHER; note = Nucleotide with phosphorothioate linkage
  modified_base 117: mod_base = OTHER; note = 2'-O-methyl modified nucleotide with phosphorothioate linkage
  modified_base 118: mod_base = OTHER; note = 2'-O-methyl modified nucleotide with phosphorothioate linkage
  modified_base 119: mod_base = OTHER; note = 2'-O-methyl modified nucleotide

SEQ ID NO: 29039 - RNA, 118 nt, synthetic construct; identical to SEQ ID NO: 28477
  source 1..118: mol_type = other RNA
  modified_base 1: mod_base = OTHER; note = 2'-O-methyl modified nucleotide with phosphorothioate linkage
  modified_base 2: mod_base = OTHER; note = 2'-O-methyl modified nucleotide with phosphorothioate linkage
  modified_base 3: mod_base = OTHER; note = 2'-O-methyl modified nucleotide with phosphorothioate linkage
  modified_base 115: mod_base = OTHER; note = Nucleotide with phosphorothioate linkage
  modified_base 116: mod_base = OTHER; note = 2'-O-methyl modified nucleotide with phosphorothioate linkage
  modified_base 117: mod_base = OTHER; note = 2'-O-methyl modified nucleotide with phosphorothioate linkage
  modified_base 118: mod_base = OTHER; note = 2'-O-methyl modified nucleotide

SEQ ID NO: 29040 - RNA, 117 nt, synthetic construct; identical to SEQ ID NO: 28478
  source 1..117: mol_type = other RNA
  modified_base 1: mod_base = OTHER; note = 2'-O-methyl modified nucleotide with phosphorothioate linkage
  modified_base 2: mod_base = OTHER; note = 2'-O-methyl modified nucleotide with phosphorothioate linkage
  modified_base 3: mod_base = OTHER; note = 2'-O-methyl modified nucleotide with phosphorothioate linkage
  modified_base 114: mod_base = OTHER; note = Nucleotide with phosphorothioate linkage
  modified_base 115: mod_base = OTHER; note = 2'-O-methyl modified nucleotide with phosphorothioate linkage
  modified_base 116: mod_base = OTHER; note = 2'-O-methyl modified nucleotide with phosphorothioate linkage
  modified_base 117: mod_base = OTHER; note = 2'-O-methyl modified nucleotide

SEQ ID NO: 29041 - RNA, 116 nt, synthetic construct; identical to SEQ ID NO: 28479
  source 1..116: mol_type = other RNA
  modified_base 1: mod_base = OTHER; note = 2'-O-methyl modified nucleotide with phosphorothioate linkage
  modified_base 2: mod_base = OTHER; note = 2'-O-methyl modified nucleotide with phosphorothioate linkage
  modified_base 3: mod_base = OTHER; note = 2'-O-methyl modified nucleotide with phosphorothioate linkage
  modified_base 113: mod_base = OTHER; note = Nucleotide with phosphorothioate linkage
  modified_base 114: mod_base = OTHER; note = 2'-O-methyl modified nucleotide with phosphorothioate linkage
  modified_base 115: mod_base = OTHER; note = 2'-O-methyl modified nucleotide with phosphorothioate linkage
  modified_base 116: mod_base = OTHER; note = 2'-O-methyl modified nucleotide

SEQ ID NO: 29042 - RNA, 115 nt, synthetic construct; identical to SEQ ID NO: 28480
  source 1..115: mol_type = other RNA
  modified_base 1: mod_base = OTHER; note = 2'-O-methyl modified nucleotide with phosphorothioate linkage
  modified_base 2: mod_base = OTHER; note = 2'-O-methyl modified nucleotide with phosphorothioate linkage
  modified_base 3: mod_base = OTHER; note = 2'-O-methyl modified nucleotide with phosphorothioate linkage
  modified_base 112: mod_base = OTHER; note = Nucleotide with phosphorothioate linkage
  modified_base 113: mod_base = OTHER; note = 2'-O-methyl modified nucleotide with phosphorothioate linkage
  modified_base 114: mod_base = OTHER; note = 2'-O-methyl modified nucleotide with phosphorothioate linkage
  modified_base 115: mod_base = OTHER; note = 2'-O-methyl modified nucleotide

SEQ ID NO: 29043 - RNA, 114 nt, synthetic construct; identical to SEQ ID NO: 28481
  source 1..114: mol_type = other RNA
  modified_base 1: mod_base = OTHER; note = 2'-O-methyl modified nucleotide with phosphorothioate linkage
  modified_base 2: mod_base = OTHER; note = 2'-O-methyl modified nucleotide with phosphorothioate linkage
  modified_base 3: mod_base = OTHER; note = 2'-O-methyl modified nucleotide with phosphorothioate linkage
  modified_base 111: mod_base = OTHER; note = Nucleotide with phosphorothioate linkage
  modified_base 112: mod_base = OTHER; note = 2'-O-methyl modified nucleotide with phosphorothioate linkage
  modified_base 113: mod_base = OTHER; note = 2'-O-methyl modified nucleotide with phosphorothioate linkage
  modified_base 114: mod_base = OTHER; note = 2'-O-methyl modified nucleotide

SEQ ID NO: 29044 - RNA, 113 nt, synthetic construct; identical to SEQ ID NO: 28482
  source 1..113: mol_type = other RNA
  modified_base 1: mod_base = OTHER; note = 2'-O-methyl modified nucleotide with phosphorothioate linkage
  modified_base 2: mod_base = OTHER; note = 2'-O-methyl modified nucleotide with phosphorothioate linkage
  modified_base 3: mod_base = OTHER; note = 2'-O-methyl modified nucleotide with phosphorothioate linkage
  modified_base 110: mod_base = OTHER; note = Nucleotide with phosphorothioate linkage
  modified_base 111: mod_base = OTHER; note = 2'-O-methyl modified nucleotide with phosphorothioate linkage
  modified_base 112: mod_base = OTHER; note = 2'-O-methyl modified nucleotide with phosphorothioate linkage
  modified_base 113: mod_base = OTHER; note = 2'-O-methyl modified nucleotide

SEQ ID NO: 29045 - RNA, 112 nt, synthetic construct; identical to SEQ ID NO: 28483
  source 1..112: mol_type = other RNA
  modified_base 1: mod_base = OTHER; note = 2'-O-methyl modified nucleotide with phosphorothioate linkage
  modified_base 2: mod_base = OTHER; note = 2'-O-methyl modified nucleotide with phosphorothioate linkage
  modified_base 3: mod_base = OTHER; note = 2'-O-methyl modified nucleotide with phosphorothioate linkage
  modified_base 109: mod_base = OTHER; note = Nucleotide with phosphorothioate linkage
  modified_base 110: mod_base = OTHER; note = 2'-O-methyl modified nucleotide with phosphorothioate linkage
  modified_base 111: mod_base = OTHER; note = 2'-O-methyl modified nucleotide with phosphorothioate linkage
  modified_base 112: mod_base = OTHER; note = 2'-O-methyl modified nucleotide

SEQ ID NO: 29046 - RNA, 111 nt, synthetic construct; identical to SEQ ID NO: 28484
  source 1..111: mol_type = other RNA
  modified_base 1: mod_base = OTHER; note = 2'-O-methyl modified nucleotide with phosphorothioate linkage
  modified_base 2: mod_base = OTHER; note = 2'-O-methyl modified nucleotide with phosphorothioate linkage
  modified_base 3: mod_base = OTHER; note = 2'-O-methyl modified nucleotide with phosphorothioate linkage
  modified_base 108: mod_base = OTHER; note = Nucleotide with phosphorothioate linkage
  modified_base 109: mod_base = OTHER; note = 2'-O-methyl modified nucleotide with phosphorothioate linkage
  modified_base 110: mod_base = OTHER; note = 2'-O-methyl modified nucleotide with phosphorothioate linkage
  modified_base 111: mod_base = OTHER; note = 2'-O-methyl modified nucleotide

SEQ ID NO: 29047 - RNA, 110 nt, synthetic construct; identical to SEQ ID NO: 28485
  source 1..110: mol_type = other RNA
  modified_base 1: mod_base = OTHER; note = 2'-O-methyl modified nucleotide with phosphorothioate linkage
  modified_base 2: mod_base = OTHER; note = 2'-O-methyl modified nucleotide with phosphorothioate linkage
  modified_base 3: mod_base = OTHER; note = 2'-O-methyl modified nucleotide with phosphorothioate linkage
  modified_base 107: mod_base = OTHER; note = Nucleotide with phosphorothioate linkage
  modified_base 108: mod_base = OTHER; note = 2'-O-methyl modified nucleotide with phosphorothioate linkage
  modified_base 109: mod_base = OTHER; note = 2'-O-methyl modified nucleotide with phosphorothioate linkage
  modified_base 110: mod_base = OTHER; note = 2'-O-methyl modified nucleotide

SEQ ID NO: 29048 - RNA, 109 nt, synthetic construct; identical to SEQ ID NO: 28486
  source 1..109: mol_type = other RNA
  modified_base 1: mod_base = OTHER; note = 2'-O-methyl modified nucleotide with phosphorothioate linkage
  modified_base 2: mod_base = OTHER; note = 2'-O-methyl modified nucleotide with phosphorothioate linkage
  modified_base 3: mod_base = OTHER; note = 2'-O-methyl modified nucleotide with phosphorothioate linkage
  modified_base 106: mod_base = OTHER; note = Nucleotide with phosphorothioate linkage
  modified_base 107: mod_base = OTHER; note = 2'-O-methyl modified nucleotide with phosphorothioate linkage
  modified_base 108: mod_base = OTHER; note = 2'-O-methyl modified nucleotide with phosphorothioate linkage
  modified_base 109: mod_base = OTHER; note = 2'-O-methyl modified nucleotide

SEQ ID NO: 29049 - RNA, 108 nt, synthetic construct; identical to SEQ ID NO: 28487
  source 1..108: mol_type = other RNA
  modified_base 1: mod_base = OTHER; note = 2'-O-methyl modified nucleotide with phosphorothioate linkage
  modified_base 2: mod_base = OTHER; note = 2'-O-methyl modified nucleotide with phosphorothioate linkage
  modified_base 3: mod_base = OTHER; note = 2'-O-methyl modified nucleotide with phosphorothioate linkage
  modified_base 105: mod_base = OTHER; note = Nucleotide with phosphorothioate linkage
  modified_base 106: mod_base = OTHER; note = 2'-O-methyl modified nucleotide with phosphorothioate linkage
  modified_base 107: mod_base = OTHER; note = 2'-O-methyl modified nucleotide with phosphorothioate linkage
  modified_base 108: mod_base = OTHER; note = 2'-O-methyl modified nucleotide

SEQ ID NO: 29050 - RNA, 120 nt, synthetic construct; identical to SEQ ID NO: 28488
  source 1..120: mol_type = other RNA
  modified_base 1: mod_base = OTHER; note = 2'-O-methyl modified nucleotide with phosphorothioate linkage
  modified_base 2: mod_base = OTHER; note = 2'-O-methyl modified nucleotide with phosphorothioate linkage
  modified_base 3: mod_base = OTHER; note = 2'-O-methyl modified nucleotide with phosphorothioate linkage
  modified_base 117: mod_base = OTHER; note = Nucleotide with phosphorothioate linkage
  modified_base 118: mod_base = OTHER; note = 2'-O-methyl modified nucleotide with phosphorothioate linkage
  modified_base 119: mod_base = OTHER; note = 2'-O-methyl modified nucleotide with phosphorothioate linkage
  modified_base 120: mod_base = OTHER; note = 2'-O-methyl modified nucleotide

SEQ ID NO: 29051 - RNA, 119 nt, synthetic construct; identical to SEQ ID NO: 28489
  source 1..119: mol_type = other RNA
  modified_base 1: mod_base = OTHER; note = 2'-O-methyl modified nucleotide with phosphorothioate linkage
  modified_base 2: mod_base = OTHER; note = 2'-O-methyl modified nucleotide with phosphorothioate linkage
  modified_base 3: mod_base = OTHER; note = 2'-O-methyl modified nucleotide with phosphorothioate linkage
  modified_base 116: mod_base = OTHER; note = Nucleotide with phosphorothioate linkage
  modified_base 117: mod_base = OTHER; note = 2'-O-methyl modified nucleotide with phosphorothioate linkage
  modified_base 118: mod_base = OTHER; note = 2'-O-methyl modified nucleotide with phosphorothioate linkage
  modified_base 119: mod_base = OTHER; note = 2'-O-methyl modified nucleotide

SEQ ID NO: 29052 - RNA, 118 nt, synthetic construct; identical to SEQ ID NO: 28490
  source 1..118: mol_type = other RNA
  modified_base 1: mod_base = OTHER; note = 2'-O-methyl modified nucleotide with phosphorothioate linkage
  modified_base 2: mod_base = OTHER; note = 2'-O-methyl modified nucleotide with phosphorothioate linkage
  modified_base 3: mod_base = OTHER; note = 2'-O-methyl modified nucleotide with phosphorothioate linkage
  modified_base 115: mod_base = OTHER; note = Nucleotide with phosphorothioate linkage
  modified_base 116: mod_base = OTHER; note = 2'-O-methyl modified nucleotide with phosphorothioate linkage
  modified_base 117: mod_base = OTHER; note = 2'-O-methyl modified nucleotide with phosphorothioate linkage
  modified_base 118: mod_base = OTHER; note = 2'-O-methyl modified nucleotide

SEQ ID NO: 29053 - RNA, 117 nt, synthetic construct; identical to SEQ ID NO: 28491
  source 1..117: mol_type = other RNA
  modified_base 1: mod_base = OTHER; note = 2'-O-methyl modified nucleotide with phosphorothioate linkage
  modified_base 2: mod_base = OTHER; note = 2'-O-methyl modified nucleotide with phosphorothioate linkage
  modified_base 3: mod_base = OTHER; note = 2'-O-methyl modified nucleotide with phosphorothioate linkage
  modified_base 114: mod_base = OTHER; note = Nucleotide with phosphorothioate linkage
  modified_base 115: mod_base = OTHER; note = 2'-O-methyl modified nucleotide with phosphorothioate linkage
  modified_base 116: mod_base = OTHER; note = 2'-O-methyl modified nucleotide with phosphorothioate linkage
  modified_base 117: mod_base = OTHER; note = 2'-O-methyl modified nucleotide

SEQ ID NO: 29054 - RNA, 116 nt, synthetic construct; identical to SEQ ID NO: 28492
  source 1..116: mol_type = other RNA
  modified_base 1: mod_base = OTHER; note = 2'-O-methyl modified nucleotide with phosphorothioate linkage
  modified_base 2: mod_base = OTHER; note = 2'-O-methyl modified nucleotide with phosphorothioate linkage
  modified_base 3: mod_base = OTHER; note = 2'-O-methyl modified nucleotide with phosphorothioate linkage
  modified_base 113: mod_base = OTHER; note = Nucleotide with phosphorothioate linkage
  modified_base 114: mod_base = OTHER; note = 2'-O-methyl modified nucleotide with phosphorothioate linkage
  modified_base 115: mod_base = OTHER; note = 2'-O-methyl modified nucleotide with phosphorothioate linkage
  modified_base 116: mod_base = OTHER; note = 2'-O-methyl modified nucleotide

SEQ ID NO: 29055 - RNA, 115 nt, synthetic construct; identical to SEQ ID NO: 28493
  source 1..115: mol_type = other RNA
  modified_base 1: mod_base = OTHER; note = 2'-O-methyl modified nucleotide with phosphorothioate linkage
  modified_base 2: mod_base = OTHER; note = 2'-O-methyl modified nucleotide with phosphorothioate linkage
  modified_base 3: mod_base = OTHER; note = 2'-O-methyl modified nucleotide with phosphorothioate linkage
  modified_base 112: mod_base = OTHER; note = Nucleotide with phosphorothioate linkage
  modified_base 113: mod_base = OTHER; note = 2'-O-methyl modified nucleotide with phosphorothioate linkage
  modified_base 114: mod_base = OTHER; note = 2'-O-methyl modified nucleotide with phosphorothioate linkage
  modified_base 115: mod_base = OTHER; note = 2'-O-methyl modified nucleotide

SEQ ID NO: 29056 - RNA, 114 nt, synthetic construct; identical to SEQ ID NO: 28494
  source 1..114: mol_type = other RNA
  modified_base 1: mod_base = OTHER; note = 2'-O-methyl modified nucleotide with phosphorothioate linkage
  modified_base 2: mod_base = OTHER; note = 2'-O-methyl modified nucleotide with phosphorothioate linkage
  modified_base 3: mod_base = OTHER; note = 2'-O-methyl modified nucleotide with phosphorothioate linkage
  modified_base 111: mod_base = OTHER; note = Nucleotide with phosphorothioate linkage
  modified_base 112: mod_base = OTHER; note = 2'-O-methyl modified nucleotide with phosphorothioate linkage
  modified_base 113: mod_base = OTHER; note = 2'-O-methyl modified nucleotide with phosphorothioate linkage
  modified_base 114: mod_base = OTHER; note = 2'-O-methyl modified nucleotide

SEQ ID NO: 29057 - RNA, 113 nt, synthetic construct; identical to SEQ ID NO: 28495
  source 1..113: mol_type = other RNA
  modified_base 1: mod_base = OTHER; note = 2'-O-methyl modified nucleotide with phosphorothioate linkage
  modified_base 2: mod_base = OTHER; note = 2'-O-methyl modified nucleotide with phosphorothioate linkage
  modified_base 3: mod_base = OTHER; note = 2'-O-methyl modified nucleotide with phosphorothioate linkage
  modified_base 110: mod_base = OTHER; note = Nucleotide with phosphorothioate linkage
  modified_base 111: mod_base = OTHER; note = 2'-O-methyl modified nucleotide with phosphorothioate linkage
  modified_base 112: mod_base = OTHER; note = 2'-O-methyl modified nucleotide with phosphorothioate linkage
  modified_base 113: mod_base = OTHER; note = 2'-O-methyl modified nucleotide

SEQ ID NO: 29058 - RNA, 112 nt, synthetic construct; identical to SEQ ID NO: 28496
  source 1..112: mol_type = other RNA
  modified_base 1: mod_base = OTHER; note = 2'-O-methyl modified nucleotide with phosphorothioate linkage
  modified_base 2: mod_base = OTHER; note = 2'-O-methyl modified nucleotide with phosphorothioate linkage
  modified_base 3: mod_base = OTHER; note = 2'-O-methyl modified nucleotide with phosphorothioate linkage
  modified_base 109: mod_base = OTHER; note = Nucleotide with phosphorothioate linkage
  modified_base 110: mod_base = OTHER; note = 2'-O-methyl modified nucleotide with phosphorothioate linkage
  modified_base 111: mod_base = OTHER; note = 2'-O-methyl modified nucleotide with phosphorothioate linkage
  modified_base 112: mod_base = OTHER; note = 2'-O-methyl modified nucleotide

SEQ ID NO: 29059 - RNA, 111 nt, synthetic construct; identical to SEQ ID NO: 28497
  source 1..111: mol_type = other RNA
  modified_base 1: mod_base = OTHER; note = 2'-O-methyl modified nucleotide with phosphorothioate linkage
  modified_base 2: mod_base = OTHER; note = 2'-O-methyl modified nucleotide with phosphorothioate linkage
  modified_base 3: mod_base = OTHER; note = 2'-O-methyl modified nucleotide with phosphorothioate linkage
  modified_base 108: mod_base = OTHER; note = Nucleotide with phosphorothioate linkage
  modified_base 109: mod_base = OTHER; note = 2'-O-methyl modified nucleotide with phosphorothioate linkage
  modified_base 110: mod_base = OTHER; note = 2'-O-methyl modified nucleotide with phosphorothioate linkage
  modified_base 111: mod_base = OTHER; note = 2'-O-methyl modified nucleotide

SEQ ID NO: 29060 - RNA, 110 nt, synthetic construct; identical to SEQ ID NO: 28498
  source 1..110: mol_type = other RNA
  modified_base 1: mod_base = OTHER; note = 2'-O-methyl modified nucleotide with phosphorothioate linkage
  modified_base 2: mod_base = OTHER; note = 2'-O-methyl modified nucleotide with phosphorothioate linkage
  modified_base 3: mod_base = OTHER; note = 2'-O-methyl modified nucleotide with phosphorothioate linkage
  modified_base 107: mod_base = OTHER; note = Nucleotide with phosphorothioate linkage
  modified_base 108: mod_base = OTHER; note = 2'-O-methyl modified nucleotide with phosphorothioate linkage
  modified_base 109: mod_base = OTHER; note = 2'-O-methyl modified nucleotide with phosphorothioate linkage
  modified_base 110: mod_base = OTHER; note = 2'-O-methyl modified nucleotide

SEQ ID NO: 29061 - RNA, 109 nt, synthetic construct; identical to SEQ ID NO: 28499
  source 1..109: mol_type = other RNA
  modified_base 1: mod_base = OTHER; note = 2'-O-methyl modified nucleotide with phosphorothioate linkage
  modified_base 2: mod_base = OTHER; note = 2'-O-methyl modified nucleotide with phosphorothioate linkage
  modified_base 3: mod_base = OTHER; note = 2'-O-methyl modified nucleotide with phosphorothioate linkage
  modified_base 106: mod_base = OTHER; note = Nucleotide with phosphorothioate linkage
  modified_base 107: mod_base = OTHER; note = 2'-O-methyl modified nucleotide with phosphorothioate linkage
  modified_base 108: mod_base = OTHER; note = 2'-O-methyl modified nucleotide with phosphorothioate linkage
  modified_base 109: mod_base = OTHER; note = 2'-O-methyl modified nucleotide

SEQ ID NO: 29062 - RNA, 121 nt, synthetic construct; identical to SEQ ID NO: 28500
  source 1..121: mol_type = other RNA
  modified_base 1: mod_base = OTHER; note = 2'-O-methyl modified nucleotide with phosphorothioate linkage
  modified_base 2: mod_base = OTHER; note = 2'-O-methyl modified nucleotide with phosphorothioate linkage
  modified_base 3: mod_base = OTHER; note = 2'-O-methyl modified nucleotide with phosphorothioate linkage
  modified_base 118: mod_base = OTHER; note = Nucleotide with phosphorothioate linkage
  modified_base 119: mod_base = OTHER; note = 2'-O-methyl modified nucleotide with phosphorothioate linkage
  modified_base 120: mod_base = OTHER; note = 2'-O-methyl modified nucleotide with phosphorothioate linkage
  modified_base 121: mod_base = OTHER; note = 2'-O-methyl modified nucleotide

SEQ ID NO: 29063 - RNA, 120 nt, synthetic construct; identical to SEQ ID NO: 28501
  source 1..120: mol_type = other RNA
  modified_base 1: mod_base = OTHER; note = 2'-O-methyl modified nucleotide with phosphorothioate linkage
  modified_base 2: mod_base = OTHER; note = 2'-O-methyl modified nucleotide with phosphorothioate linkage
  modified_base 3: mod_base = OTHER; note = 2'-O-methyl modified nucleotide with phosphorothioate linkage
  modified_base 117: mod_base = OTHER; note = Nucleotide with phosphorothioate linkage
  modified_base 118: mod_base = OTHER; note = 2'-O-methyl modified nucleotide with phosphorothioate linkage
  modified_base 119: mod_base = OTHER; note = 2'-O-methyl modified nucleotide with phosphorothioate linkage
  modified_base 120: mod_base = OTHER; note = 2'-O-methyl modified nucleotide

SEQ ID NO: 29064 - RNA, 119 nt, synthetic construct; identical to SEQ ID NO: 28502
  source 1..119: mol_type = other RNA
  modified_base 1: mod_base = OTHER; note = 2'-O-methyl modified nucleotide with phosphorothioate linkage
  modified_base 2: mod_base = OTHER; note = 2'-O-methyl modified nucleotide with phosphorothioate linkage
  modified_base 3: mod_base = OTHER; note = 2'-O-methyl modified nucleotide with phosphorothioate linkage
  modified_base 116: mod_base = OTHER; note = Nucleotide with phosphorothioate linkage
  modified_base 117: mod_base = OTHER; note = 2'-O-methyl modified nucleotide with phosphorothioate linkage
  modified_base 118: mod_base = OTHER; note = 2'-O-methyl modified nucleotide with phosphorothioate linkage
  modified_base 119: mod_base = OTHER; note = 2'-O-methyl modified nucleotide

SEQ ID NO: 29065 - RNA, 118 nt, synthetic construct; identical to SEQ ID NO: 28503
  source 1..118: mol_type = other RNA
  modified_base 1: mod_base = OTHER; note = 2'-O-methyl modified nucleotide with phosphorothioate linkage
  modified_base 2: mod_base = OTHER; note = 2'-O-methyl modified nucleotide with phosphorothioate linkage
  modified_base 3: mod_base = OTHER; note = 2'-O-methyl modified nucleotide with phosphorothioate linkage
  modified_base 115: mod_base = OTHER; note = Nucleotide with phosphorothioate linkage
  modified_base 116: mod_base = OTHER; note = 2'-O-methyl modified nucleotide with phosphorothioate linkage
  modified_base 117: mod_base = OTHER; note = 2'-O-methyl modified nucleotide with phosphorothioate linkage
  modified_base 118: mod_base = OTHER; note = 2'-O-methyl modified nucleotide

SEQ ID NO: 29066 - RNA, 117 nt, synthetic construct; identical to SEQ ID NO: 28504
  source 1..117: mol_type = other RNA
  modified_base 1: mod_base = OTHER; note = 2'-O-methyl modified nucleotide with phosphorothioate linkage
  modified_base 2: mod_base = OTHER; note = 2'-O-methyl modified nucleotide with phosphorothioate linkage
  modified_base 3: mod_base = OTHER; note = 2'-O-methyl modified nucleotide with phosphorothioate linkage
  modified_base 114: mod_base = OTHER; note = Nucleotide with phosphorothioate linkage
  modified_base 115: mod_base = OTHER; note = 2'-O-methyl modified nucleotide with phosphorothioate linkage
  modified_base 116: mod_base = OTHER; note = 2'-O-methyl modified nucleotide with phosphorothioate linkage
  modified_base 117: mod_base = OTHER; note = 2'-O-methyl modified nucleotide

SEQ ID NO: 29067 - RNA, 116 nt, synthetic construct; identical to SEQ ID NO: 28505
  source 1..116: mol_type = other RNA
  modified_base 1: mod_base = OTHER; note = 2'-O-methyl modified nucleotide with phosphorothioate linkage
  modified_base 2: mod_base = OTHER; note = 2'-O-methyl modified nucleotide with phosphorothioate linkage
  modified_base 3: mod_base = OTHER; note = 2'-O-methyl modified nucleotide with phosphorothioate linkage
  modified_base 113: mod_base = OTHER; note = Nucleotide with phosphorothioate linkage
  modified_base 114: mod_base = OTHER; note = 2'-O-methyl modified nucleotide with phosphorothioate linkage
  modified_base 115: mod_base = OTHER; note = 2'-O-methyl modified nucleotide with phosphorothioate linkage
  modified_base 116: mod_base = OTHER; note = 2'-O-methyl modified nucleotide

SEQ ID NO: 29068 - RNA, 115 nt, synthetic construct; identical to SEQ ID NO: 28506
  source 1..115: mol_type = other RNA
  modified_base 1: mod_base = OTHER; note = 2'-O-methyl modified nucleotide with phosphorothioate linkage
  modified_base 2: mod_base = OTHER; note = 2'-O-methyl modified nucleotide with phosphorothioate linkage
  modified_base 3: mod_base = OTHER; note = 2'-O-methyl modified nucleotide with phosphorothioate linkage
  modified_base 112: mod_base = OTHER; note = Nucleotide with phosphorothioate linkage
  modified_base 113: mod_base = OTHER; note = 2'-O-methyl modified nucleotide with phosphorothioate linkage
  modified_base 114: mod_base = OTHER; note = 2'-O-methyl modified nucleotide with phosphorothioate linkage
  modified_base 115: mod_base = OTHER; note = 2'-O-methyl modified nucleotide

SEQ ID NO: 29069 - RNA, 114 nt, synthetic construct; identical to SEQ ID NO: 28507
  source 1..114: mol_type = other RNA
  modified_base 1: mod_base = OTHER; note = 2'-O-methyl modified nucleotide with phosphorothioate linkage
  modified_base 2: mod_base = OTHER; note = 2'-O-methyl modified nucleotide with phosphorothioate linkage
  modified_base 3: mod_base = OTHER; note = 2'-O-methyl modified nucleotide with phosphorothioate linkage
  modified_base 111: mod_base = OTHER; note = Nucleotide with phosphorothioate linkage
  modified_base 112: mod_base = OTHER; note = 2'-O-methyl modified nucleotide with phosphorothioate linkage
  modified_base 113: mod_base = OTHER; note = 2'-O-methyl modified nucleotide with phosphorothioate linkage
  modified_base 114: mod_base = OTHER; note = 2'-O-methyl modified nucleotide

SEQ ID NO: 29070 - RNA, 113 nt, synthetic construct; identical to SEQ ID NO: 28508
  source 1..113: mol_type = other RNA
  modified_base 1: mod_base = OTHER; note = 2'-O-methyl modified nucleotide with phosphorothioate linkage
  modified_base 2: mod_base = OTHER; note = 2'-O-methyl modified nucleotide with phosphorothioate linkage
  modified_base 3: mod_base = OTHER; note = 2'-O-methyl modified nucleotide with phosphorothioate linkage
  modified_base 110: mod_base = OTHER; note = Nucleotide with phosphorothioate linkage
  modified_base 111: mod_base = OTHER; note = 2'-O-methyl modified nucleotide with phosphorothioate linkage
  modified_base 112: mod_base = OTHER; note = 2'-O-methyl modified nucleotide with phosphorothioate linkage
  modified_base 113: mod_base = OTHER; note = 2'-O-methyl modified nucleotide

SEQ ID NO: 29071 - RNA, 112 nt, synthetic construct; identical to SEQ ID NO: 28509
  source 1..112: mol_type = other RNA
  modified_base 1: mod_base = OTHER; note = 2'-O-methyl modified nucleotide with phosphorothioate linkage
  modified_base 2: mod_base = OTHER; note = 2'-O-methyl modified nucleotide with phosphorothioate linkage
  modified_base 3: mod_base = OTHER; note = 2'-O-methyl modified nucleotide with phosphorothioate linkage
  modified_base 109: mod_base = OTHER; note = Nucleotide with phosphorothioate linkage
  modified_base 110: mod_base = OTHER; note = 2'-O-methyl modified nucleotide with phosphorothioate linkage
  modified_base 111: mod_base = OTHER; note = 2'-O-methyl modified nucleotide with phosphorothioate linkage
  modified_base 112: mod_base = OTHER; note = 2'-O-methyl modified nucleotide

SEQ ID NO: 29072 - RNA, 111 nt, synthetic construct; identical to SEQ ID NO: 28510
  source 1..111: mol_type = other RNA
  modified_base 1: mod_base = OTHER; note = 2'-O-methyl modified nucleotide with phosphorothioate linkage
  modified_base 2: mod_base = OTHER; note = 2'-O-methyl modified nucleotide with phosphorothioate linkage
  modified_base 3: mod_base = OTHER; note = 2'-O-methyl modified nucleotide with phosphorothioate linkage
  modified_base 108: mod_base = OTHER; note = Nucleotide with phosphorothioate linkage
  modified_base 109: mod_base = OTHER; note = 2'-O-methyl modified nucleotide with phosphorothioate linkage
  modified_base 110: mod_base = OTHER; note = 2'-O-methyl modified nucleotide with phosphorothioate linkage
  modified_base 111: mod_base = OTHER; note = 2'-O-methyl modified nucleotide

SEQ ID NO: 29073 - RNA, 110 nt, synthetic construct; identical to SEQ ID NO: 28511
  source 1..110: mol_type = other RNA
  modified_base 1: mod_base = OTHER; note = 2'-O-methyl modified nucleotide with phosphorothioate linkage
  modified_base 2: mod_base = OTHER; note = 2'-O-methyl modified nucleotide with phosphorothioate linkage
  modified_base 3: mod_base = OTHER; note = 2'-O-methyl modified nucleotide with phosphorothioate linkage
  modified_base 107: mod_base = OTHER; note = Nucleotide with phosphorothioate linkage
  modified_base 108: mod_base = OTHER; note = 2'-O-methyl modified nucleotide with phosphorothioate linkage
  modified_base 109: mod_base = OTHER; note = 2'-O-methyl modified nucleotide with phosphorothioate linkage
  modified_base 110: mod_base = OTHER; note = 2'-O-methyl modified nucleotide

SEQ ID NO: 29074 - RNA, 122 nt, synthetic construct; identical to SEQ ID NO: 28512
  source 1..122: mol_type = other RNA
  modified_base 1: mod_base = OTHER; note = 2'-O-methyl modified nucleotide with phosphorothioate linkage
  modified_base 2: mod_base = OTHER; note = 2'-O-methyl modified nucleotide with phosphorothioate linkage
  modified_base 3: mod_base = OTHER; note = 2'-O-methyl modified nucleotide with phosphorothioate linkage
  modified_base 119: mod_base = OTHER; note = Nucleotide with phosphorothioate linkage
  modified_base 120: mod_base = OTHER; note = 2'-O-methyl modified nucleotide with phosphorothioate linkage
  modified_base 121: mod_base = OTHER; note = 2'-O-methyl modified nucleotide with phosphorothioate linkage
  modified_base 122: mod_base = OTHER; note = 2'-O-methyl modified nucleotide

SEQ ID NO: 29075 - RNA, 121 nt, synthetic construct; identical to SEQ ID NO: 28513
  source 1..121: mol_type = other RNA
  modified_base 1: mod_base = OTHER; note = 2'-O-methyl modified nucleotide with phosphorothioate linkage
  modified_base 2: mod_base = OTHER; note = 2'-O-methyl modified nucleotide with phosphorothioate linkage
  modified_base 3: mod_base = OTHER; note = 2'-O-methyl modified nucleotide with phosphorothioate linkage
  modified_base 118: mod_base = OTHER; note = Nucleotide with phosphorothioate linkage
  modified_base 119: mod_base = OTHER; note = 2'-O-methyl modified nucleotide with phosphorothioate linkage
  modified_base 120: mod_base = OTHER; note = 2'-O-methyl modified nucleotide with phosphorothioate linkage
  modified_base 121: mod_base = OTHER; note = 2'-O-methyl modified nucleotide

SEQ ID NO: 29076 - RNA, 120 nt, synthetic construct; identical to SEQ ID NO: 28514
  source 1..120: mol_type = other RNA
  modified_base 1: mod_base = OTHER; note = 2'-O-methyl modified nucleotide with phosphorothioate linkage
  modified_base 2: mod_base = OTHER; note = 2'-O-methyl modified nucleotide with phosphorothioate linkage
  modified_base 3: mod_base = OTHER; note = 2'-O-methyl modified nucleotide with phosphorothioate linkage
  modified_base 117: mod_base = OTHER; note = Nucleotide with phosphorothioate linkage
  modified_base 118: mod_base = OTHER; note = 2'-O-methyl modified nucleotide with phosphorothioate linkage
  modified_base 119: mod_base = OTHER; note = 2'-O-methyl modified nucleotide with phosphorothioate linkage
  modified_base 120: mod_base = OTHER; note = 2'-O-methyl modified nucleotide

SEQ ID NO: 29077 - RNA, 119 nt, synthetic construct; identical to SEQ ID NO: 28515
  source 1..119: mol_type = other RNA
  modified_base 1: mod_base = OTHER; note = 2'-O-methyl modified nucleotide with phosphorothioate linkage
  modified_base 2: mod_base = OTHER; note = 2'-O-methyl modified nucleotide with phosphorothioate linkage
  modified_base 3: mod_base = OTHER; note = 2'-O-methyl modified nucleotide with phosphorothioate linkage
  modified_base 116: mod_base = OTHER; note = Nucleotide with phosphorothioate linkage
  modified_base 117: mod_base = OTHER; note = 2'-O-methyl modified nucleotide with phosphorothioate linkage
  modified_base 118: mod_base = OTHER; note = 2'-O-methyl modified nucleotide with phosphorothioate linkage
  modified_base 119: mod_base = OTHER; note = 2'-O-methyl modified nucleotide

SEQ ID NO: 29078 - RNA, 118 nt, synthetic construct; identical to SEQ ID NO: 28516
  source 1..118: mol_type = other RNA
  modified_base 1: mod_base = OTHER; note = 2'-O-methyl modified nucleotide with phosphorothioate linkage
  modified_base 2: mod_base = OTHER; note = 2'-O-methyl modified nucleotide with phosphorothioate linkage
  modified_base 3: mod_base = OTHER; note = 2'-O-methyl modified nucleotide with phosphorothioate linkage
  modified_base 115: mod_base = OTHER; note = Nucleotide with phosphorothioate linkage
  modified_base 116: mod_base = OTHER; note = 2'-O-methyl modified nucleotide with phosphorothioate linkage
  modified_base 117: mod_base = OTHER; note = 2'-O-methyl modified nucleotide with phosphorothioate linkage
  modified_base 118: mod_base = OTHER; note = 2'-O-methyl modified nucleotide

SEQ ID NO: 29079 - RNA, 117 nt, synthetic construct; identical to SEQ ID NO: 28517
  source 1..117: mol_type = other RNA
  modified_base 1: mod_base = OTHER; note = 2'-O-methyl modified nucleotide with phosphorothioate linkage
  modified_base 2: mod_base = OTHER; note = 2'-O-methyl modified nucleotide with phosphorothioate linkage
  modified_base 3: mod_base = OTHER; note = 2'-O-methyl modified nucleotide with phosphorothioate linkage
  modified_base 114: mod_base = OTHER; note = Nucleotide with phosphorothioate linkage
  modified_base 115: mod_base = OTHER; note = 2'-O-methyl modified nucleotide with phosphorothioate linkage
  modified_base 116: mod_base = OTHER; note = 2'-O-methyl modified nucleotide with phosphorothioate linkage
  modified_base 117: mod_base = OTHER; note = 2'-O-methyl modified nucleotide

SEQ ID NO: 29080 - RNA, 116 nt, synthetic construct; identical to SEQ ID NO: 28518
  source 1..116: mol_type = other RNA
  modified_base 1: mod_base = OTHER; note = 2'-O-methyl modified nucleotide with phosphorothioate linkage
  modified_base 2: mod_base = OTHER; note = 2'-O-methyl modified nucleotide with phosphorothioate linkage
  modified_base 3: mod_base = OTHER; note = 2'-O-methyl modified nucleotide with phosphorothioate linkage
  modified_base 113: mod_base = OTHER; note = Nucleotide with phosphorothioate linkage
  modified_base 114: mod_base = OTHER; note = 2'-O-methyl modified nucleotide with phosphorothioate linkage
  modified_base 115: mod_base = OTHER; note = 2'-O-methyl modified nucleotide with phosphorothioate linkage
  modified_base 116: mod_base = OTHER; note = 2'-O-methyl modified nucleotide

SEQ ID NO: 29081 - RNA, 115 nt, synthetic construct; identical to SEQ ID NO: 28519
  source 1..115: mol_type = other RNA
  modified_base 1: mod_base = OTHER; note = 2'-O-methyl modified nucleotide with phosphorothioate linkage
  modified_base 2: mod_base = OTHER; note = 2'-O-methyl modified nucleotide with phosphorothioate linkage
  modified_base 3: mod_base = OTHER; note = 2'-O-methyl modified nucleotide with phosphorothioate linkage
  modified_base 112: mod_base = OTHER; note = Nucleotide with phosphorothioate linkage
  modified_base 113: mod_base = OTHER; note = 2'-O-methyl modified nucleotide with phosphorothioate linkage
  modified_base 114: mod_base = OTHER; note = 2'-O-methyl modified nucleotide with phosphorothioate linkage
  modified_base 115: mod_base = OTHER; note = 2'-O-methyl modified nucleotide

SEQ ID NO: 29082 - RNA, 114 nt, synthetic construct; identical to SEQ ID NO: 28520
  source 1..114: mol_type = other RNA
  modified_base 1: mod_base = OTHER; note = 2'-O-methyl modified nucleotide with phosphorothioate linkage
  modified_base 2: mod_base = OTHER; note = 2'-O-methyl modified nucleotide with phosphorothioate linkage
  modified_base 3: mod_base = OTHER; note = 2'-O-methyl modified nucleotide with phosphorothioate linkage
  modified_base 111: mod_base = OTHER; note = Nucleotide with phosphorothioate linkage
  modified_base 112: mod_base = OTHER; note = 2'-O-methyl modified nucleotide with phosphorothioate linkage
  modified_base 113: mod_base = OTHER; note = 2'-O-methyl modified nucleotide with phosphorothioate linkage
  modified_base 114: mod_base = OTHER; note = 2'-O-methyl modified nucleotide

SEQ ID NO: 29083 - RNA, 113 nt, synthetic construct; identical to SEQ ID NO: 28521
  source 1..113: mol_type = other RNA
  modified_base 1: mod_base = OTHER; note = 2'-O-methyl modified nucleotide with phosphorothioate linkage
  modified_base 2: mod_base = OTHER; note = 2'-O-methyl modified nucleotide with phosphorothioate linkage
  modified_base 3: mod_base = OTHER; note = 2'-O-methyl modified nucleotide with phosphorothioate linkage
  modified_base 110: mod_base = OTHER; note = Nucleotide with phosphorothioate linkage
  modified_base 111: mod_base = OTHER; note = 2'-O-methyl modified nucleotide with phosphorothioate linkage
  modified_base 112: mod_base = OTHER; note = 2'-O-methyl modified nucleotide with phosphorothioate linkage
  modified_base 113: mod_base = OTHER; note = 2'-O-methyl modified nucleotide

SEQ ID NO: 29084 - RNA, 112 nt, synthetic construct; identical to SEQ ID NO: 28522
  source 1..112: mol_type = other RNA
  modified_base 1: mod_base = OTHER; note = 2'-O-methyl modified nucleotide with phosphorothioate linkage
  modified_base 2: mod_base = OTHER; note = 2'-O-methyl modified nucleotide with phosphorothioate linkage
  modified_base 3: mod_base = OTHER; note = 2'-O-methyl modified nucleotide with phosphorothioate linkage
  modified_base 109: mod_base = OTHER; note = Nucleotide with phosphorothioate linkage
  modified_base 110: mod_base = OTHER; note = 2'-O-methyl modified nucleotide with phosphorothioate linkage
  modified_base 111: mod_base = OTHER; note = 2'-O-methyl modified nucleotide with phosphorothioate linkage
  modified_base 112: mod_base = OTHER; note = 2'-O-methyl modified nucleotide

SEQ ID NO: 29085 - RNA, 111 nt, synthetic construct; identical to SEQ ID NO: 28523
  source 1..111: mol_type = other RNA
  modified_base 1: mod_base = OTHER; note = 2'-O-methyl modified nucleotide with phosphorothioate linkage
  modified_base 2: mod_base = OTHER; note = 2'-O-methyl modified nucleotide with phosphorothioate linkage
  modified_base 3: mod_base = OTHER; note = 2'-O-methyl modified nucleotide with phosphorothioate linkage
  modified_base 108: mod_base = OTHER; note = Nucleotide with phosphorothioate linkage
  modified_base 109: mod_base = OTHER; note = 2'-O-methyl modified nucleotide with phosphorothioate linkage
  modified_base 110: mod_base = OTHER; note = 2'-O-methyl modified nucleotide with phosphorothioate linkage
  modified_base 111: mod_base = OTHER; note = 2'-O-methyl modified nucleotide

SEQ ID NO: 29086 - RNA, 123 nt, synthetic construct; identical to SEQ ID NO: 28524
  source 1..123: mol_type = other RNA
  modified_base 1: mod_base = OTHER; note = 2'-O-methyl modified nucleotide with phosphorothioate linkage
  modified_base 2: mod_base = OTHER; note = 2'-O-methyl modified nucleotide with phosphorothioate linkage
  modified_base 3: mod_base = OTHER; note = 2'-O-methyl modified nucleotide with phosphorothioate linkage
  modified_base 120: mod_base = OTHER; note = Nucleotide with phosphorothioate linkage
  modified_base 121: mod_base = OTHER; note = 2'-O-methyl modified nucleotide with phosphorothioate linkage
  modified_base 122: mod_base = OTHER; note = 2'-O-methyl modified nucleotide with phosphorothioate linkage
  modified_base 123: mod_base = OTHER; note = 2'-O-methyl modified nucleotide

SEQ ID NO: 29087 - RNA, 122 nt, synthetic construct; identical to SEQ ID NO: 28525
  source 1..122: mol_type = other RNA
  modified_base 1: mod_base = OTHER; note = 2'-O-methyl modified nucleotide with phosphorothioate linkage
  modified_base 2: mod_base = OTHER; note = 2'-O-methyl modified nucleotide with phosphorothioate linkage
  modified_base 3: mod_base = OTHER; note = 2'-O-methyl modified nucleotide with phosphorothioate linkage
  modified_base 119: mod_base = OTHER; note = Nucleotide with phosphorothioate linkage
  modified_base 120: mod_base = OTHER; note = 2'-O-methyl modified nucleotide with phosphorothioate linkage
  modified_base 121: mod_base = OTHER; note = 2'-O-methyl modified nucleotide with phosphorothioate linkage
  modified_base 122: mod_base = OTHER; note = 2'-O-methyl modified nucleotide

SEQ ID NO: 29088 - RNA, 121 nt, synthetic construct; identical to SEQ ID NO: 28526
  source 1..121: mol_type = other RNA
  modified_base 1: mod_base = OTHER; note = 2'-O-methyl modified nucleotide with phosphorothioate linkage
  modified_base 2: mod_base = OTHER; note = 2'-O-methyl modified nucleotide with phosphorothioate linkage
  modified_base 3: mod_base = OTHER; note = 2'-O-methyl modified nucleotide with phosphorothioate linkage
  modified_base 118: mod_base = OTHER; note = Nucleotide with phosphorothioate linkage
  modified_base 119: mod_base = OTHER; note = 2'-O-methyl modified nucleotide with phosphorothioate linkage
  modified_base 120: mod_base = OTHER; note = 2'-O-methyl modified nucleotide with phosphorothioate linkage
  modified_base 121: mod_base = OTHER; note = 2'-O-methyl modified nucleotide

SEQ ID NO: 29089 - RNA, 120 nt, synthetic construct; identical to SEQ ID NO: 28527
  source 1..120: mol_type = other RNA
  modified_base 1: mod_base = OTHER; note = 2'-O-methyl modified nucleotide with phosphorothioate linkage
  modified_base 2: mod_base = OTHER; note = 2'-O-methyl modified nucleotide with phosphorothioate linkage
  modified_base 3: mod_base = OTHER; note = 2'-O-methyl modified nucleotide with phosphorothioate linkage
  modified_base 117: mod_base = OTHER; note = Nucleotide with phosphorothioate linkage
  modified_base 118: mod_base = OTHER; note = 2'-O-methyl modified nucleotide with phosphorothioate linkage
  modified_base 119: mod_base = OTHER; note = 2'-O-methyl modified nucleotide with phosphorothioate linkage
  modified_base 120: mod_base = OTHER; note = 2'-O-methyl modified nucleotide

SEQ ID NO: 29090 - RNA, 119 nt, synthetic construct; identical to SEQ ID NO: 28528
  source 1..119: mol_type = other RNA
  modified_base 1: mod_base = OTHER; note = 2'-O-methyl modified nucleotide with phosphorothioate linkage
  modified_base 2: mod_base = OTHER; note = 2'-O-methyl modified nucleotide with phosphorothioate linkage
  modified_base 3: mod_base = OTHER; note = 2'-O-methyl modified nucleotide with phosphorothioate linkage
  modified_base 116: mod_base = OTHER; note = Nucleotide with phosphorothioate linkage
  modified_base 117: mod_base = OTHER; note = 2'-O-methyl modified nucleotide with phosphorothioate linkage
  modified_base 118: mod_base = OTHER; note = 2'-O-methyl modified nucleotide with phosphorothioate linkage
  modified_base 119: mod_base = OTHER; note = 2'-O-methyl modified nucleotide

SEQ ID NO: 29091 - RNA, 118 nt, synthetic construct; identical to SEQ ID NO: 28529
  source 1..118: mol_type = other RNA
  modified_base 1: mod_base = OTHER; note = 2'-O-methyl modified nucleotide with phosphorothioate linkage
  modified_base 2: mod_base = OTHER; note = 2'-O-methyl modified nucleotide with phosphorothioate linkage
  modified_base 3: mod_base = OTHER; note = 2'-O-methyl modified nucleotide with phosphorothioate linkage
  modified_base 115: mod_base = OTHER; note = Nucleotide with phosphorothioate linkage
  modified_base 116: mod_base = OTHER; note = 2'-O-methyl modified nucleotide with phosphorothioate linkage
  modified_base 117: mod_base = OTHER; note = 2'-O-methyl modified nucleotide with phosphorothioate linkage
  modified_base 118: mod_base = OTHER; note = 2'-O-methyl modified nucleotide

SEQ ID NO: 29092 - RNA, 117 nt, synthetic construct; identical to SEQ ID NO: 28530
  source 1..117: mol_type = other RNA
  modified_base 1: mod_base = OTHER; note = 2'-O-methyl modified nucleotide with phosphorothioate linkage
  modified_base 2: mod_base = OTHER; note = 2'-O-methyl modified nucleotide with phosphorothioate linkage
  modified_base 3: mod_base = OTHER; note = 2'-O-methyl modified nucleotide with phosphorothioate linkage
  modified_base 114: mod_base = OTHER; note = Nucleotide with phosphorothioate linkage
  modified_base 115: mod_base = OTHER; note = 2'-O-methyl modified nucleotide with phosphorothioate linkage
  modified_base 116: mod_base = OTHER; note = 2'-O-methyl modified nucleotide with phosphorothioate linkage
  modified_base 117: mod_base = OTHER; note = 2'-O-methyl modified nucleotide

SEQ ID NO: 29093 - RNA, 116 nt, synthetic construct; identical to SEQ ID NO: 28531
  source 1..116: mol_type = other RNA
  modified_base 1: mod_base = OTHER; note = 2'-O-methyl modified nucleotide with phosphorothioate linkage
  modified_base 2: mod_base = OTHER; note = 2'-O-methyl modified nucleotide with phosphorothioate linkage
  modified_base 3: mod_base = OTHER; note = 2'-O-methyl modified nucleotide with phosphorothioate linkage
  modified_base 113: mod_base = OTHER; note = Nucleotide with phosphorothioate linkage
  modified_base 114: mod_base = OTHER; note = 2'-O-methyl modified nucleotide with phosphorothioate linkage
  modified_base 115: mod_base = OTHER; note = 2'-O-methyl modified nucleotide with phosphorothioate linkage
  modified_base 116: mod_base = OTHER; note = 2'-O-methyl modified nucleotide

SEQ ID NO: 29094 - RNA, 115 nt, synthetic construct; identical to SEQ ID NO: 28532
  source 1..115: mol_type = other RNA
  modified_base 1: mod_base = OTHER; note = 2'-O-methyl modified nucleotide with phosphorothioate linkage
  modified_base 2: mod_base = OTHER; note = 2'-O-methyl modified nucleotide with phosphorothioate linkage
  modified_base 3: mod_base = OTHER; note = 2'-O-methyl modified nucleotide with phosphorothioate linkage
  modified_base 112: mod_base = OTHER; note = Nucleotide with phosphorothioate linkage
  modified_base 113: mod_base = OTHER; note = 2'-O-methyl modified nucleotide with phosphorothioate linkage
  modified_base 114: mod_base = OTHER; note = 2'-O-methyl modified nucleotide with phosphorothioate linkage
  modified_base 115: mod_base = OTHER; note = 2'-O-methyl modified nucleotide

SEQ ID NO: 29095 - RNA, 114 nt, synthetic construct; identical to SEQ ID NO: 28533
  source 1..114: mol_type = other RNA
  modified_base 1: mod_base = OTHER; note = 2'-O-methyl modified nucleotide with phosphorothioate linkage
  modified_base 2: mod_base = OTHER; note = 2'-O-methyl modified nucleotide with phosphorothioate linkage
  modified_base 3: mod_base = OTHER; note = 2'-O-methyl modified nucleotide with phosphorothioate linkage
  modified_base 111: mod_base = OTHER; note = Nucleotide with phosphorothioate linkage
  modified_base 112: mod_base = OTHER; note = 2'-O-methyl modified nucleotide with phosphorothioate linkage
  modified_base 113: mod_base = OTHER; note = 2'-O-methyl modified nucleotide with phosphorothioate linkage
  modified_base 114: mod_base = OTHER; note = 2'-O-methyl modified nucleotide

SEQ ID NO: 29096 - RNA, 113 nt, synthetic construct; identical to SEQ ID NO: 28534
  source 1..113: mol_type = other RNA
  modified_base 1: mod_base = OTHER; note = 2'-O-methyl modified nucleotide with phosphorothioate linkage
  modified_base 2: mod_base = OTHER; note = 2'-O-methyl modified nucleotide with phosphorothioate linkage
  modified_base 3: mod_base = OTHER; note = 2'-O-methyl modified nucleotide with phosphorothioate linkage
  modified_base 110: mod_base = OTHER; note = Nucleotide with phosphorothioate linkage
  modified_base 111: mod_base = OTHER; note = 2'-O-methyl modified nucleotide with phosphorothioate linkage
  modified_base 112: mod_base = OTHER; note = 2'-O-methyl modified nucleotide with phosphorothioate linkage
  modified_base 113: mod_base = OTHER; note = 2'-O-methyl modified nucleotide

SEQ ID NO: 29097 - RNA, 112 nt, synthetic construct; identical to SEQ ID NO: 28535
  source 1..112: mol_type = other RNA
  modified_base 1: mod_base = OTHER; note = 2'-O-methyl modified nucleotide with phosphorothioate linkage
  modified_base 2: mod_base = OTHER; note = 2'-O-methyl modified nucleotide with phosphorothioate linkage
  modified_base 3: mod_base = OTHER; note = 2'-O-methyl modified nucleotide with phosphorothioate linkage
  modified_base 109: mod_base = OTHER; note = Nucleotide with phosphorothioate linkage
  modified_base 110: mod_base = OTHER; note = 2'-O-methyl modified nucleotide with phosphorothioate linkage
  modified_base 111: mod_base = OTHER; note = 2'-O-methyl modified nucleotide with phosphorothioate linkage
  modified_base 112: mod_base = OTHER; note = 2'-O-methyl modified nucleotide

SEQ ID NO: 29098 - RNA, 124 nt, synthetic construct; identical to SEQ ID NO: 28536
  source 1..124: mol_type = other RNA
  modified_base 1: mod_base = OTHER; note = 2'-O-methyl modified nucleotide with phosphorothioate linkage
  modified_base 2: mod_base = OTHER; note = 2'-O-methyl modified nucleotide with phosphorothioate linkage
  modified_base 3: mod_base = OTHER; note = 2'-O-methyl modified nucleotide with phosphorothioate linkage
  modified_base 121: mod_base = OTHER; note = Nucleotide with phosphorothioate linkage
  modified_base 122: mod_base = OTHER; note = 2'-O-methyl modified nucleotide with phosphorothioate linkage
  modified_base 123: mod_base = OTHER; note = 2'-O-methyl modified nucleotide with phosphorothioate linkage
  modified_base 124: mod_base = OTHER; note = 2'-O-methyl modified nucleotide

SEQ ID NO: 29099 - RNA, 123 nt, synthetic construct; identical to SEQ ID NO: 28537
  source 1..123: mol_type = other RNA
  modified_base 1: mod_base = OTHER; note = 2'-O-methyl modified nucleotide with phosphorothioate linkage
  modified_base 2: mod_base = OTHER; note = 2'-O-methyl modified nucleotide with phosphorothioate linkage
  modified_base 3: mod_base = OTHER; note = 2'-O-methyl modified nucleotide with phosphorothioate linkage
  modified_base 120: mod_base = OTHER; note = Nucleotide with phosphorothioate linkage
  modified_base 121: mod_base = OTHER; note = 2'-O-methyl modified nucleotide with phosphorothioate linkage
  modified_base 122: mod_base = OTHER; note = 2'-O-methyl modified nucleotide with phosphorothioate linkage
  modified_base 123: mod_base = OTHER; note = 2'-O-methyl modified nucleotide

SEQ ID NO: 29100 - RNA, 122 nt, synthetic construct; identical to SEQ ID NO: 28538
  source 1..122: mol_type = other RNA
  modified_base 1: mod_base = OTHER; note = 2'-O-methyl modified nucleotide with phosphorothioate linkage
  modified_base 2: mod_base = OTHER; note = 2'-O-methyl modified nucleotide with phosphorothioate linkage
  modified_base 3: mod_base = OTHER; note = 2'-O-methyl modified nucleotide with phosphorothioate linkage
  modified_base 119: mod_base = OTHER; note = Nucleotide with phosphorothioate linkage
  modified_base 120: mod_base = OTHER; note = 2'-O-methyl modified nucleotide with phosphorothioate linkage
  modified_base 121: mod_base = OTHER; note = 2'-O-methyl modified nucleotide with phosphorothioate linkage
  modified_base 122: mod_base = OTHER; note = 2'-O-methyl modified nucleotide

SEQ ID NO: 29101 - RNA, 121 nt, synthetic construct; identical to SEQ ID NO: 28539
  source 1..121: mol_type = other RNA
  modified_base 1: mod_base = OTHER; note = 2'-O-methyl modified nucleotide with phosphorothioate linkage
  modified_base 2: mod_base = OTHER; note = 2'-O-methyl modified nucleotide with phosphorothioate linkage
  modified_base 3: mod_base = OTHER; note = 2'-O-methyl modified nucleotide with phosphorothioate linkage
  modified_base 118: mod_base = OTHER; note = Nucleotide with phosphorothioate linkage
  modified_base 119: mod_base = OTHER; note = 2'-O-methyl modified nucleotide with phosphorothioate linkage
  modified_base 120: mod_base = OTHER; note = 2'-O-methyl modified nucleotide with phosphorothioate linkage
  modified_base 121: mod_base = OTHER; note = 2'-O-methyl modified nucleotide

SEQ ID NO: 29102 - RNA, 120 nt, synthetic construct; identical to SEQ ID NO: 28540
  source 1..120: mol_type = other RNA
  modified_base 1: mod_base = OTHER; note = 2'-O-methyl modified nucleotide with phosphorothioate linkage
  modified_base 2: mod_base = OTHER; note = 2'-O-methyl modified nucleotide with phosphorothioate linkage
  modified_base 3: mod_base = OTHER; note = 2'-O-methyl modified nucleotide with phosphorothioate linkage
  modified_base 117: mod_base = OTHER; note = Nucleotide with phosphorothioate linkage
  modified_base 118: mod_base = OTHER; note = 2'-O-methyl modified nucleotide with phosphorothioate linkage
  modified_base 119: mod_base = OTHER; note = 2'-O-methyl modified nucleotide with phosphorothioate linkage
  modified_base 120: mod_base = OTHER; note = 2'-O-methyl modified nucleotide

SEQ ID NO: 29103 - RNA, 119 nt, synthetic construct; identical to SEQ ID NO: 28541
  source 1..119: mol_type = other RNA
  modified_base 1: mod_base = OTHER; note = 2'-O-methyl modified nucleotide with phosphorothioate linkage
  modified_base 2: mod_base = OTHER; note = 2'-O-methyl modified nucleotide with phosphorothioate linkage
  modified_base 3: mod_base = OTHER; note = 2'-O-methyl modified nucleotide with phosphorothioate linkage
  modified_base 116: mod_base = OTHER; note = Nucleotide with phosphorothioate linkage
  modified_base 117: mod_base = OTHER; note = 2'-O-methyl modified nucleotide with phosphorothioate linkage
  modified_base 118: mod_base = OTHER; note = 2'-O-methyl modified nucleotide with phosphorothioate linkage
  modified_base 119: mod_base = OTHER; note = 2'-O-methyl modified nucleotide

SEQ ID NO: 29104 - RNA, 118 nt, synthetic construct; identical to SEQ ID NO: 28542
  source 1..118: mol_type = other RNA
  modified_base 1: mod_base = OTHER; note = 2'-O-methyl modified nucleotide with phosphorothioate linkage
  modified_base 2: mod_base = OTHER; note = 2'-O-methyl modified nucleotide with phosphorothioate linkage
  modified_base 3: mod_base = OTHER; note = 2'-O-methyl modified nucleotide with phosphorothioate linkage
  modified_base 115: mod_base = OTHER; note = Nucleotide with phosphorothioate linkage
  modified_base 116: mod_base = OTHER; note = 2'-O-methyl modified nucleotide with phosphorothioate linkage
  modified_base 117: mod_base = OTHER; note = 2'-O-methyl modified nucleotide with phosphorothioate linkage
  modified_base 118: mod_base = OTHER; note = 2'-O-methyl modified nucleotide

SEQ ID NO: 29105 - RNA, 117 nt, synthetic construct; identical to SEQ ID NO: 28543
  source 1..117: mol_type = other RNA
  modified_base 1: mod_base = OTHER; note = 2'-O-methyl modified nucleotide with phosphorothioate linkage
  modified_base 2: mod_base = OTHER; note = 2'-O-methyl modified nucleotide with phosphorothioate linkage
  modified_base 3: mod_base = OTHER; note = 2'-O-methyl modified nucleotide with phosphorothioate linkage
  modified_base 114: mod_base = OTHER; note = Nucleotide with phosphorothioate linkage
  modified_base 115: mod_base = OTHER; note = 2'-O-methyl modified nucleotide with phosphorothioate linkage
  modified_base 116: mod_base = OTHER; note = 2'-O-methyl modified nucleotide with phosphorothioate linkage
  modified_base 117: mod_base = OTHER; note = 2'-O-methyl modified nucleotide

SEQ ID NO: 29106 - RNA, 116 nt, synthetic construct; identical to SEQ ID NO: 28544
  source 1..116: mol_type = other RNA
  modified_base 1: mod_base = OTHER; note = 2'-O-methyl modified nucleotide with phosphorothioate linkage
  modified_base 2: mod_base = OTHER; note = 2'-O-methyl modified nucleotide with phosphorothioate linkage
  modified_base 3: mod_base = OTHER; note = 2'-O-methyl modified nucleotide with phosphorothioate linkage
  modified_base 113: mod_base = OTHER; note = Nucleotide with phosphorothioate linkage
  modified_base 114: mod_base = OTHER; note = 2'-O-methyl modified nucleotide with phosphorothioate linkage
  modified_base 115: mod_base = OTHER; note = 2'-O-methyl modified nucleotide with phosphorothioate linkage
  modified_base 116: mod_base = OTHER; note = 2'-O-methyl modified nucleotide

SEQ ID NO: 29107 - RNA, 115 nt, synthetic construct; identical to SEQ ID NO: 28545
  source 1..115: mol_type = other RNA
  modified_base 1: mod_base = OTHER; note = 2'-O-methyl modified nucleotide with phosphorothioate linkage
  modified_base 2: mod_base = OTHER; note = 2'-O-methyl modified nucleotide with phosphorothioate linkage
  modified_base 3: mod_base = OTHER; note = 2'-O-methyl modified nucleotide with phosphorothioate linkage
  modified_base 112: mod_base = OTHER; note = Nucleotide with phosphorothioate linkage
  modified_base 113: mod_base = OTHER; note = 2'-O-methyl modified nucleotide with phosphorothioate linkage
  modified_base 114: mod_base = OTHER; note = 2'-O-methyl modified nucleotide with phosphorothioate linkage
  modified_base 115: mod_base = OTHER; note = 2'-O-methyl modified nucleotide

SEQ ID NO: 29108 - RNA, 114 nt, synthetic construct; identical to SEQ ID NO: 28546
  source 1..114: mol_type = other RNA
  modified_base 1: mod_base = OTHER; note = 2'-O-methyl modified nucleotide with phosphorothioate linkage
  modified_base 2: mod_base = OTHER; note = 2'-O-methyl modified nucleotide with phosphorothioate linkage
  modified_base 3: mod_base = OTHER; note = 2'-O-methyl modified nucleotide with phosphorothioate linkage
  modified_base 111: mod_base = OTHER; note = Nucleotide with phosphorothioate linkage
  modified_base 112: mod_base = OTHER; note = 2'-O-methyl modified nucleotide with phosphorothioate linkage
  modified_base 113: mod_base = OTHER; note = 2'-O-methyl modified nucleotide with phosphorothioate linkage
  modified_base 114: mod_base = OTHER; note = 2'-O-methyl modified nucleotide

SEQ ID NO: 29109 - RNA, 113 nt, synthetic construct; identical to SEQ ID NO: 28547
  source 1..113: mol_type = other RNA
  modified_base 1: mod_base = OTHER; note = 2'-O-methyl modified nucleotide with phosphorothioate linkage
  modified_base 2: mod_base = OTHER; note = 2'-O-methyl modified nucleotide with phosphorothioate linkage
  modified_base 3: mod_base = OTHER; note = 2'-O-methyl modified nucleotide with phosphorothioate linkage
  modified_base 110: mod_base = OTHER; note = Nucleotide with phosphorothioate linkage
  modified_base 111: mod_base = OTHER; note = 2'-O-methyl modified nucleotide with phosphorothioate linkage
  modified_base 112: mod_base = OTHER; note = 2'-O-methyl modified nucleotide with phosphorothioate linkage
  modified_base 113: mod_base = OTHER; note = 2'-O-methyl modified nucleotide

SEQ ID NO: 29110 - RNA, 125 nt, synthetic construct; identical to SEQ ID NO: 28548
  source 1..125: mol_type = other RNA
  modified_base 1: mod_base = OTHER; note = 2'-O-methyl modified nucleotide with phosphorothioate linkage
  modified_base 2: mod_base = OTHER; note = 2'-O-methyl modified nucleotide with phosphorothioate linkage
  modified_base 3: mod_base = OTHER; note = 2'-O-methyl modified nucleotide with phosphorothioate linkage
  modified_base 122: mod_base = OTHER; note = Nucleotide with phosphorothioate linkage
  modified_base 123: mod_base = OTHER; note = 2'-O-methyl modified nucleotide with phosphorothioate linkage
  modified_base 124: mod_base = OTHER; note = 2'-O-methyl modified nucleotide with phosphorothioate linkage
  modified_base 125: mod_base = OTHER; note = 2'-O-methyl modified nucleotide

SEQ ID NO: 29111 - RNA, 124 nt, synthetic construct; identical to SEQ ID NO: 28549
  source 1..124: mol_type = other RNA
  modified_base 1: mod_base = OTHER; note = 2'-O-methyl modified nucleotide with phosphorothioate linkage
  modified_base 2: mod_base = OTHER; note = 2'-O-methyl modified nucleotide with phosphorothioate linkage
  modified_base 3: mod_base = OTHER; note = 2'-O-methyl modified nucleotide with phosphorothioate linkage
  modified_base 121: mod_base = OTHER; note = Nucleotide with phosphorothioate linkage
  modified_base 122: mod_base = OTHER; note = 2'-O-methyl modified nucleotide with phosphorothioate linkage
  modified_base 123: mod_base = OTHER; note = 2'-O-methyl modified nucleotide with phosphorothioate linkage
  modified_base 124: mod_base = OTHER; note = 2'-O-methyl modified nucleotide

SEQ ID NO: 29112 - RNA, 123 nt, synthetic construct; identical to SEQ ID NO: 28550
  source 1..123: mol_type = other RNA
  modified_base 1: mod_base = OTHER; note = 2'-O-methyl modified nucleotide with phosphorothioate linkage
  modified_base 2: mod_base = OTHER; note = 2'-O-methyl modified nucleotide with phosphorothioate linkage
  modified_base 3: mod_base = OTHER; note = 2'-O-methyl modified nucleotide with phosphorothioate linkage
  modified_base 120: mod_base = OTHER; note = Nucleotide with phosphorothioate linkage
  modified_base 121: mod_base = OTHER; note = 2'-O-methyl modified nucleotide with phosphorothioate linkage
  modified_base 122: mod_base = OTHER; note = 2'-O-methyl modified nucleotide with phosphorothioate linkage
  modified_base 123: mod_base = OTHER; note = 2'-O-methyl modified nucleotide

SEQ ID NO: 29113 - RNA, 122 nt, synthetic construct; identical to SEQ ID NO: 28551
  source 1..122: mol_type = other RNA
  modified_base 1: mod_base = OTHER; note = 2'-O-methyl modified nucleotide with phosphorothioate linkage
  modified_base 2: mod_base = OTHER; note = 2'-O-methyl modified nucleotide with phosphorothioate linkage
  modified_base 3: mod_base = OTHER; note = 2'-O-methyl modified nucleotide with phosphorothioate linkage
  modified_base 119: mod_base = OTHER; note = Nucleotide with phosphorothioate linkage
  modified_base 120: mod_base = OTHER; note = 2'-O-methyl modified nucleotide with phosphorothioate linkage
  modified_base 121: mod_base = OTHER; note = 2'-O-methyl modified nucleotide with phosphorothioate linkage
  modified_base 122: mod_base = OTHER; note = 2'-O-methyl modified nucleotide

SEQ ID NO: 29114 - RNA, 121 nt, synthetic construct; identical to SEQ ID NO: 28552
  source 1..121: mol_type = other RNA
  modified_base 1: mod_base = OTHER; note = 2'-O-methyl modified nucleotide with phosphorothioate linkage
  modified_base 2: mod_base = OTHER; note = 2'-O-methyl modified nucleotide with phosphorothioate linkage
  modified_base 3: mod_base = OTHER; note = 2'-O-methyl modified nucleotide with phosphorothioate linkage
  modified_base 118: mod_base = OTHER; note = Nucleotide with phosphorothioate linkage
  modified_base 119: mod_base = OTHER; note = 2'-O-methyl modified nucleotide with phosphorothioate linkage
  modified_base 120: mod_base = OTHER; note = 2'-O-methyl modified nucleotide with phosphorothioate linkage
  modified_base 121: mod_base = OTHER; note = 2'-O-methyl modified nucleotide

SEQ ID NO: 29115 - RNA, 120 nt, synthetic construct; identical to SEQ ID NO: 28553
  source 1..120: mol_type = other RNA
  modified_base 1: mod_base = OTHER; note = 2'-O-methyl modified nucleotide with phosphorothioate linkage
  modified_base 2: mod_base = OTHER; note = 2'-O-methyl modified nucleotide with phosphorothioate linkage
  modified_base 3: mod_base = OTHER; note = 2'-O-methyl modified nucleotide with phosphorothioate linkage
  modified_base 117: mod_base = OTHER; note = Nucleotide with phosphorothioate linkage
  modified_base 118: mod_base = OTHER; note = 2'-O-methyl modified nucleotide with phosphorothioate linkage
  modified_base 119: mod_base = OTHER; note = 2'-O-methyl modified nucleotide with phosphorothioate linkage
  modified_base 120: mod_base = OTHER; note = 2'-O-methyl modified nucleotide

SEQ ID NO: 29116 - RNA, 119 nt, synthetic construct; identical to SEQ ID NO: 28554
  source 1..119: mol_type = other RNA
  modified_base 1: mod_base = OTHER; note = 2'-O-methyl modified nucleotide with phosphorothioate linkage
  modified_base 2: mod_base = OTHER; note = 2'-O-methyl modified nucleotide with phosphorothioate linkage
  modified_base 3: mod_base = OTHER; note = 2'-O-methyl modified nucleotide with phosphorothioate linkage
  modified_base 116: mod_base = OTHER; note = Nucleotide with phosphorothioate linkage
  modified_base 117: mod_base = OTHER; note = 2'-O-methyl modified nucleotide with phosphorothioate linkage
  modified_base 118: mod_base = OTHER; note = 2'-O-methyl modified nucleotide with phosphorothioate linkage
  modified_base 119: mod_base = OTHER; note = 2'-O-methyl modified nucleotide

SEQ ID NO: 29117 - RNA, 118 nt, synthetic construct; identical to SEQ ID NO: 28555
  source 1..118: mol_type = other RNA
  modified_base 1: mod_base = OTHER; note = 2'-O-methyl modified nucleotide with phosphorothioate linkage
  modified_base 2: mod_base = OTHER; note = 2'-O-methyl modified nucleotide with phosphorothioate linkage
  modified_base 3: mod_base = OTHER; note = 2'-O-methyl modified nucleotide with phosphorothioate linkage
  modified_base 115: mod_base = OTHER; note = Nucleotide with phosphorothioate linkage
  modified_base 116: mod_base = OTHER; note = 2'-O-methyl modified nucleotide with phosphorothioate linkage
  modified_base 117: mod_base = OTHER; note = 2'-O-methyl modified nucleotide with phosphorothioate linkage
  modified_base 118: mod_base = OTHER; note = 2'-O-methyl modified nucleotide

SEQ ID NO: 29118 - RNA, 117 nt, synthetic construct; identical to SEQ ID NO: 28556
  source 1..117: mol_type = other RNA
  modified_base 1: mod_base = OTHER; note = 2'-O-methyl modified nucleotide with phosphorothioate linkage
  modified_base 2: mod_base = OTHER; note = 2'-O-methyl modified nucleotide with phosphorothioate linkage
  modified_base 3: mod_base = OTHER; note = 2'-O-methyl modified nucleotide with phosphorothioate linkage
  modified_base 114: mod_base = OTHER; note = Nucleotide with phosphorothioate linkage
  modified_base 115: mod_base = OTHER; note = 2'-O-methyl modified nucleotide with phosphorothioate linkage
  modified_base 116: mod_base = OTHER; note = 2'-O-methyl modified nucleotide with phosphorothioate linkage
  modified_base 117: mod_base = OTHER; note = 2'-O-methyl modified nucleotide

SEQ ID NO: 29119 - RNA, 116 nt, synthetic construct; identical to SEQ ID NO: 28557
  source 1..116: mol_type = other RNA
  modified_base 1: mod_base = OTHER; note = 2'-O-methyl modified nucleotide with phosphorothioate linkage
  modified_base 2: mod_base = OTHER; note = 2'-O-methyl modified nucleotide with phosphorothioate linkage
  modified_base 3: mod_base = OTHER; note = 2'-O-methyl modified nucleotide with phosphorothioate linkage
  modified_base 113: mod_base = OTHER; note = Nucleotide with phosphorothioate linkage
  modified_base 114: mod_base = OTHER; note = 2'-O-methyl modified nucleotide with phosphorothioate linkage
  modified_base 115: mod_base = OTHER; note = 2'-O-methyl modified nucleotide with phosphorothioate linkage
  modified_base 116: mod_base = OTHER; note = 2'-O-methyl modified nucleotide

SEQ ID NO: 29120 - RNA, 115 nt, synthetic construct; identical to SEQ ID NO: 28558
  source 1..115: mol_type = other RNA
  modified_base 1: mod_base = OTHER; note = 2'-O-methyl modified nucleotide with phosphorothioate linkage
  modified_base 2: mod_base = OTHER; note = 2'-O-methyl modified nucleotide with phosphorothioate linkage
  modified_base 3: mod_base = OTHER; note = 2'-O-methyl modified nucleotide with phosphorothioate linkage
  modified_base 112: mod_base = OTHER; note = Nucleotide with phosphorothioate linkage
  modified_base 113: mod_base = OTHER; note = 2'-O-methyl modified nucleotide with phosphorothioate linkage
  modified_base 114: mod_base = OTHER; note = 2'-O-methyl modified nucleotide with phosphorothioate linkage
  modified_base 115: mod_base = OTHER; note = 2'-O-methyl modified nucleotide

SEQ ID NO: 29121 - RNA, 114 nt, synthetic construct; identical to SEQ ID NO: 28559
  source 1..114: mol_type = other RNA
  modified_base 1: mod_base = OTHER; note = 2'-O-methyl modified nucleotide with phosphorothioate linkage
  modified_base 2: mod_base = OTHER; note = 2'-O-methyl modified nucleotide with phosphorothioate linkage
  modified_base 3: mod_base = OTHER; note = 2'-O-methyl modified nucleotide with phosphorothioate linkage
  modified_base 111: mod_base = OTHER; note = Nucleotide with phosphorothioate linkage
  modified_base 112: mod_base = OTHER; note = 2'-O-methyl modified nucleotide with phosphorothioate linkage
  modified_base 113: mod_base = OTHER; note = 2'-O-methyl modified nucleotide with phosphorothioate linkage
  modified_base 114: mod_base = OTHER; note = 2'-O-methyl modified nucleotide

SEQ ID NO: 29122 - RNA, 126 nt, synthetic construct; identical to SEQ ID NO: 28560
  source 1..126: mol_type = other RNA
  modified_base 1: mod_base = OTHER; note = 2'-O-methyl modified nucleotide with phosphorothioate linkage
  modified_base 2: mod_base = OTHER; note = 2'-O-methyl modified nucleotide with phosphorothioate linkage
  modified_base 3: mod_base = OTHER; note = 2'-O-methyl modified nucleotide with phosphorothioate linkage
  modified_base 123: mod_base = OTHER; note = Nucleotide with phosphorothioate linkage
  modified_base 124: mod_base = OTHER; note = 2'-O-methyl modified nucleotide with phosphorothioate linkage
  modified_base 125: mod_base = OTHER; note = 2'-O-methyl modified nucleotide with phosphorothioate linkage
  modified_base 126: mod_base = OTHER; note = 2'-O-methyl modified nucleotide

SEQ ID NO: 29123 - RNA, 125 nt, synthetic construct; identical to SEQ ID NO: 28561
  source 1..125: mol_type = other RNA
  modified_base 1: mod_base = OTHER; note = 2'-O-methyl modified nucleotide with phosphorothioate linkage
  modified_base 2: mod_base = OTHER; note = 2'-O-methyl modified nucleotide with phosphorothioate linkage
  modified_base 3: mod_base = OTHER; note = 2'-O-methyl modified nucleotide with phosphorothioate linkage
  modified_base 122: mod_base = OTHER; note = Nucleotide with phosphorothioate linkage
  modified_base 123: mod_base = OTHER; note = 2'-O-methyl modified nucleotide with phosphorothioate linkage
  modified_base 124: mod_base = OTHER; note = 2'-O-methyl modified nucleotide with phosphorothioate linkage
  modified_base 125: mod_base = OTHER; note = 2'-O-methyl modified nucleotide

SEQ ID NO: 29124 - RNA, 124 nt, synthetic construct; identical to SEQ ID NO: 28562
  source 1..124: mol_type = other RNA
  modified_base 1: mod_base = OTHER; note = 2'-O-methyl modified nucleotide with phosphorothioate linkage
  modified_base 2: mod_base = OTHER; note = 2'-O-methyl modified nucleotide with phosphorothioate linkage
  modified_base 3: mod_base = OTHER; note = 2'-O-methyl modified nucleotide with phosphorothioate linkage
  modified_base 121: mod_base = OTHER; note = Nucleotide with phosphorothioate linkage
  modified_base 122: mod_base = OTHER; note = 2'-O-methyl modified nucleotide with phosphorothioate linkage
  modified_base 123: mod_base = OTHER; note = 2'-O-methyl modified nucleotide with phosphorothioate linkage
  modified_base 124: mod_base = OTHER; note = 2'-O-methyl modified nucleotide

SEQ ID NO: 29125 - RNA, 123 nt, synthetic construct; identical to SEQ ID NO: 28563
  source 1..123: mol_type = other RNA
  modified_base 1: mod_base = OTHER; note = 2'-O-methyl modified nucleotide with phosphorothioate linkage
  modified_base 2: mod_base = OTHER; note = 2'-O-methyl modified nucleotide with phosphorothioate linkage
  modified_base 3: mod_base = OTHER; note = 2'-O-methyl modified nucleotide with phosphorothioate linkage
  modified_base 120: mod_base = OTHER; note = Nucleotide with phosphorothioate linkage
  modified_base 121: mod_base = OTHER; note = 2'-O-methyl modified nucleotide with phosphorothioate linkage
  modified_base 122: mod_base = OTHER; note = 2'-O-methyl modified nucleotide with phosphorothioate linkage
  modified_base 123: mod_base = OTHER; note = 2'-O-methyl modified nucleotide

SEQ ID NO: 29126 - RNA, 122 nt, synthetic construct; identical to SEQ ID NO: 28564
  source 1..122: mol_type = other RNA
  modified_base 1: mod_base = OTHER; note = 2'-O-methyl modified nucleotide with phosphorothioate linkage
  modified_base 2: mod_base = OTHER; note = 2'-O-methyl modified nucleotide with phosphorothioate linkage
  modified_base 3: mod_base = OTHER; note = 2'-O-methyl modified nucleotide with phosphorothioate linkage
  modified_base 119: mod_base = OTHER; note = Nucleotide with phosphorothioate linkage
  modified_base 120: mod_base = OTHER; note = 2'-O-methyl modified nucleotide with phosphorothioate linkage
  modified_base 121: mod_base = OTHER; note = 2'-O-methyl modified nucleotide with phosphorothioate linkage
  modified_base 122: mod_base = OTHER; note = 2'-O-methyl modified nucleotide

SEQ ID NO: 29127 - RNA, 121 nt, synthetic construct; identical to SEQ ID NO: 28565
  source 1..121: mol_type = other RNA
  modified_base 1: mod_base = OTHER; note = 2'-O-methyl modified nucleotide with phosphorothioate linkage
  modified_base 2: mod_base = OTHER; note = 2'-O-methyl modified nucleotide with phosphorothioate linkage
  modified_base 3: mod_base = OTHER; note = 2'-O-methyl modified nucleotide with phosphorothioate linkage
  modified_base 118: mod_base = OTHER; note = Nucleotide with phosphorothioate linkage
  modified_base 119: mod_base = OTHER; note = 2'-O-methyl modified nucleotide with phosphorothioate linkage
  modified_base 120: mod_base = OTHER; note = 2'-O-methyl modified nucleotide with phosphorothioate linkage
  modified_base 121: mod_base = OTHER; note = 2'-O-methyl modified nucleotide

SEQ ID NO: 29128 - RNA, 120 nt, synthetic construct; identical to SEQ ID NO: 28566
  source 1..120: mol_type = other RNA
  modified_base 1: mod_base = OTHER; note = 2'-O-methyl modified nucleotide with phosphorothioate linkage
  modified_base 2: mod_base = OTHER; note = 2'-O-methyl modified nucleotide with phosphorothioate linkage
  modified_base 3: mod_base = OTHER; note = 2'-O-methyl modified nucleotide with phosphorothioate linkage
  modified_base 117: mod_base = OTHER; note = Nucleotide with phosphorothioate linkage
  modified_base 118: mod_base = OTHER; note = 2'-O-methyl modified nucleotide with phosphorothioate linkage
  modified_base 119: mod_base = OTHER; note = 2'-O-methyl modified nucleotide with phosphorothioate linkage
  modified_base 120: mod_base = OTHER; note = 2'-O-methyl modified nucleotide

SEQ ID NO: 29129 - RNA, 119 nt, synthetic construct; identical to SEQ ID NO: 28567
  source 1..119: mol_type = other RNA
  modified_base 1: mod_base = OTHER; note = 2'-O-methyl modified nucleotide with phosphorothioate linkage
  modified_base 2: mod_base = OTHER; note = 2'-O-methyl modified nucleotide with phosphorothioate linkage
  modified_base 3: mod_base = OTHER; note = 2'-O-methyl modified nucleotide with phosphorothioate linkage
  modified_base 116: mod_base = OTHER; note = Nucleotide with phosphorothioate linkage
  modified_base 117: mod_base = OTHER; note = 2'-O-methyl modified nucleotide with phosphorothioate linkage
  modified_base 118: mod_base = OTHER; note = 2'-O-methyl modified nucleotide with phosphorothioate linkage
  modified_base 119: mod_base = OTHER; note = 2'-O-methyl modified nucleotide

SEQ ID NO: 29130 - RNA, 118 nt, synthetic construct; identical to SEQ ID NO: 28568
  source 1..118: mol_type = other RNA
  modified_base 1: mod_base = OTHER; note = 2'-O-methyl modified nucleotide with phosphorothioate linkage
  modified_base 2: mod_base = OTHER; note = 2'-O-methyl modified nucleotide with phosphorothioate linkage
  modified_base 3: mod_base = OTHER; note = 2'-O-methyl modified nucleotide with phosphorothioate linkage
  modified_base 115: mod_base = OTHER; note = Nucleotide with phosphorothioate linkage
  modified_base 116: mod_base = OTHER; note = 2'-O-methyl modified nucleotide with phosphorothioate linkage
  modified_base 117: mod_base = OTHER; note = 2'-O-methyl modified nucleotide with phosphorothioate linkage
  modified_base 118: mod_base = OTHER; note = 2'-O-methyl modified nucleotide

SEQ ID NO: 29131 - RNA, 117 nt, synthetic construct; identical to SEQ ID NO: 28569
  source 1..117: mol_type = other RNA
  modified_base 1: mod_base = OTHER; note = 2'-O-methyl modified nucleotide with phosphorothioate linkage
  modified_base 2: mod_base = OTHER; note = 2'-O-methyl modified nucleotide with phosphorothioate linkage
  modified_base 3: mod_base = OTHER; note = 2'-O-methyl modified nucleotide with phosphorothioate linkage
  modified_base 114: mod_base = OTHER; note = Nucleotide with phosphorothioate linkage
  modified_base 115: mod_base = OTHER; note = 2'-O-methyl modified nucleotide with phosphorothioate linkage
  modified_base 116: mod_base = OTHER; note = 2'-O-methyl modified nucleotide with phosphorothioate linkage
  modified_base 117: mod_base = OTHER; note = 2'-O-methyl modified nucleotide

SEQ ID NO: 29132 - RNA, 116 nt, synthetic construct; identical to SEQ ID NO: 28570
  source 1..116: mol_type = other RNA
  modified_base 1: mod_base = OTHER; note = 2'-O-methyl modified nucleotide with phosphorothioate linkage
  modified_base 2: mod_base = OTHER; note = 2'-O-methyl modified nucleotide with phosphorothioate linkage
  modified_base 3: mod_base = OTHER; note = 2'-O-methyl modified nucleotide with phosphorothioate linkage
  modified_base 113: mod_base = OTHER; note = Nucleotide with phosphorothioate linkage
  modified_base 114: mod_base = OTHER; note = 2'-O-methyl modified nucleotide with phosphorothioate linkage
  modified_base 115: mod_base = OTHER; note = 2'-O-methyl modified nucleotide with phosphorothioate linkage
  modified_base 116: mod_base = OTHER; note = 2'-O-methyl modified nucleotide

SEQ ID NO: 29133 - RNA, 115 nt, synthetic construct; identical to SEQ ID NO: 28571
  source 1..115: mol_type = other RNA
  modified_base 1: mod_base = OTHER; note = 2'-O-methyl modified nucleotide with phosphorothioate linkage
  modified_base 2: mod_base = OTHER; note = 2'-O-methyl modified nucleotide with phosphorothioate linkage
  modified_base 3: mod_base = OTHER; note = 2'-O-methyl modified nucleotide with phosphorothioate linkage
  modified_base 112: mod_base = OTHER; note = Nucleotide with phosphorothioate linkage
  modified_base 113: mod_base = OTHER; note = 2'-O-methyl modified nucleotide with phosphorothioate linkage
  modified_base 114: mod_base = OTHER; note = 2'-O-methyl modified nucleotide with phosphorothioate linkage
  modified_base 115: mod_base = OTHER; note = 2'-O-methyl modified nucleotide

SEQ ID NO: 29134 - RNA, 127 nt, synthetic construct; identical to SEQ ID NO: 28572
  source 1..127: mol_type = other RNA
  modified_base 1: mod_base = OTHER; note = 2'-O-methyl modified nucleotide with phosphorothioate linkage
  modified_base 2: mod_base = OTHER; note = 2'-O-methyl modified nucleotide with phosphorothioate linkage
  modified_base 3: mod_base = OTHER; note = 2'-O-methyl modified nucleotide with phosphorothioate linkage
  modified_base 124: mod_base = OTHER; note = Nucleotide with phosphorothioate linkage
  modified_base 125: mod_base = OTHER; note = 2'-O-methyl modified nucleotide with phosphorothioate linkage
  modified_base 126: mod_base = OTHER; note = 2'-O-methyl modified nucleotide with phosphorothioate linkage
  modified_base 127: mod_base = OTHER; note = 2'-O-methyl modified nucleotide

SEQ ID NO: 29135 - RNA, 126 nt, synthetic construct; identical to SEQ ID NO: 28573
  source 1..126: mol_type = other RNA
  modified_base 1: mod_base = OTHER; note = 2'-O-methyl modified nucleotide with phosphorothioate linkage
  modified_base 2: mod_base = OTHER; note = 2'-O-methyl modified nucleotide with phosphorothioate linkage
  modified_base 3: mod_base = OTHER; note = 2'-O-methyl modified nucleotide with phosphorothioate linkage
  modified_base 123: mod_base = OTHER; note = Nucleotide with phosphorothioate linkage
  modified_base 124: mod_base = OTHER; note = 2'-O-methyl modified nucleotide with phosphorothioate linkage
  modified_base 125: mod_base = OTHER; note = 2'-O-methyl modified nucleotide with phosphorothioate linkage
  modified_base 126: mod_base = OTHER; note = 2'-O-methyl modified nucleotide

SEQ ID NO: 29136 - RNA, 125 nt, synthetic construct; identical to SEQ ID NO: 28574
  source 1..125: mol_type = other RNA
  modified_base 1: mod_base = OTHER; note = 2'-O-methyl modified nucleotide with phosphorothioate linkage
  modified_base 2: mod_base = OTHER; note = 2'-O-methyl modified nucleotide with phosphorothioate linkage
  modified_base 3: mod_base = OTHER; note = 2'-O-methyl modified nucleotide with phosphorothioate linkage
  modified_base 122: mod_base = OTHER; note = Nucleotide with phosphorothioate linkage
  modified_base 123: mod_base = OTHER; note = 2'-O-methyl modified nucleotide with phosphorothioate linkage
  modified_base 124: mod_base = OTHER; note = 2'-O-methyl modified nucleotide with phosphorothioate linkage
  modified_base 125: mod_base = OTHER; note = 2'-O-methyl modified nucleotide

SEQ ID NO: 29137 - RNA, 124 nt, synthetic construct; identical to SEQ ID NO: 28575
  source 1..124: mol_type = other RNA
  modified_base 1: mod_base = OTHER; note = 2'-O-methyl modified nucleotide with phosphorothioate linkage
  modified_base 2: mod_base = OTHER; note = 2'-O-methyl modified nucleotide with phosphorothioate linkage
  modified_base 3: mod_base = OTHER; note = 2'-O-methyl modified nucleotide with phosphorothioate linkage
  modified_base 121: mod_base = OTHER; note = Nucleotide with phosphorothioate linkage
  modified_base 122: mod_base = OTHER; note = 2'-O-methyl modified nucleotide with phosphorothioate linkage
  modified_base 123: mod_base = OTHER; note = 2'-O-methyl modified nucleotide with phosphorothioate linkage
  modified_base 124: mod_base = OTHER; note = 2'-O-methyl modified nucleotide

SEQ ID NO: 29138 - RNA, 123 nt, synthetic construct; identical to SEQ ID NO: 28576
  source 1..123: mol_type = other RNA
  modified_base 1: mod_base = OTHER; note = 2'-O-methyl modified nucleotide with phosphorothioate linkage
  modified_base 2: mod_base = OTHER; note = 2'-O-methyl modified nucleotide with phosphorothioate linkage
  modified_base 3: mod_base = OTHER; note = 2'-O-methyl modified nucleotide with phosphorothioate linkage
  modified_base 120: mod_base = OTHER; note = Nucleotide with phosphorothioate linkage
  modified_base 121: mod_base = OTHER; note = 2'-O-methyl modified nucleotide with phosphorothioate linkage
  modified_base 122: mod_base = OTHER; note = 2'-O-methyl modified nucleotide with phosphorothioate linkage
  modified_base 123: mod_base = OTHER; note = 2'-O-methyl modified nucleotide

SEQ ID NO: 29139 - RNA, 122 nt, synthetic construct; identical to SEQ ID NO: 28577
  source 1..122: mol_type = other RNA
  modified_base 1: mod_base = OTHER; note = 2'-O-methyl modified nucleotide with phosphorothioate linkage
  modified_base 2: mod_base = OTHER; note = 2'-O-methyl modified nucleotide with phosphorothioate linkage
  modified_base 3: mod_base = OTHER; note = 2'-O-methyl modified nucleotide with phosphorothioate linkage
  modified_base 119: mod_base = OTHER; note = Nucleotide with phosphorothioate linkage
  modified_base 120: mod_base = OTHER; note = 2'-O-methyl modified nucleotide with phosphorothioate linkage
  modified_base 121: mod_base = OTHER; note = 2'-O-methyl modified nucleotide with phosphorothioate linkage
  modified_base 122: mod_base = OTHER; note = 2'-O-methyl modified nucleotide

SEQ ID NO: 29140 - RNA, 121 nt, synthetic construct; identical to SEQ ID NO: 28578
  source 1..121: mol_type = other RNA
  modified_base 1: mod_base = OTHER; note = 2'-O-methyl modified nucleotide with phosphorothioate linkage
  modified_base 2: mod_base = OTHER; note = 2'-O-methyl modified nucleotide with phosphorothioate linkage
  modified_base 3: mod_base = OTHER; note = 2'-O-methyl modified nucleotide with phosphorothioate linkage
  modified_base 118: mod_base = OTHER; note = Nucleotide with phosphorothioate linkage
  modified_base 119: mod_base = OTHER; note = 2'-O-methyl modified nucleotide with phosphorothioate linkage
  modified_base 120: mod_base = OTHER; note = 2'-O-methyl modified nucleotide with phosphorothioate linkage
  modified_base 121: mod_base = OTHER; note = 2'-O-methyl modified nucleotide

SEQ ID NO: 29141 - RNA, 120 nt, synthetic construct; identical to SEQ ID NO: 28579
  source 1..120: mol_type = other RNA
  modified_base 1: mod_base = OTHER; note = 2'-O-methyl modified nucleotide with phosphorothioate linkage
  modified_base 2: mod_base = OTHER; note = 2'-O-methyl modified nucleotide with phosphorothioate linkage
  modified_base 3: mod_base = OTHER; note = 2'-O-methyl modified nucleotide with phosphorothioate linkage
  modified_base 117: mod_base = OTHER; note = Nucleotide with phosphorothioate linkage
  modified_base 118: mod_base = OTHER; note = 2'-O-methyl modified nucleotide with phosphorothioate linkage
  modified_base 119: mod_base = OTHER; note = 2'-O-methyl modified nucleotide with phosphorothioate linkage
  modified_base 120: mod_base = OTHER; note = 2'-O-methyl modified nucleotide

SEQ ID NO: 29142 - RNA, 119 nt, synthetic construct; identical to SEQ ID NO: 28580
  source 1..119: mol_type = other RNA
  modified_base 1: mod_base = OTHER; note = 2'-O-methyl modified nucleotide with phosphorothioate linkage
  modified_base 2: mod_base = OTHER; note = 2'-O-methyl modified nucleotide with phosphorothioate linkage
  modified_base 3: mod_base = OTHER; note = 2'-O-methyl modified nucleotide with phosphorothioate linkage
  modified_base 116: mod_base = OTHER; note = Nucleotide with phosphorothioate linkage
  modified_base 117: mod_base = OTHER; note = 2'-O-methyl modified nucleotide with phosphorothioate linkage
  modified_base 118: mod_base = OTHER; note = 2'-O-methyl modified nucleotide with phosphorothioate linkage
  modified_base 119: mod_base = OTHER; note = 2'-O-methyl modified nucleotide

SEQ ID NO: 29143 - RNA, 118 nt, synthetic construct; identical to SEQ ID NO: 28581
  source 1..118: mol_type = other RNA
  modified_base 1: mod_base = OTHER; note = 2'-O-methyl modified nucleotide with phosphorothioate linkage
  modified_base 2: mod_base = OTHER; note = 2'-O-methyl modified nucleotide with phosphorothioate linkage
  modified_base 3: mod_base = OTHER; note = 2'-O-methyl modified nucleotide with phosphorothioate linkage
  modified_base 115: mod_base = OTHER; note = Nucleotide with phosphorothioate linkage
  modified_base 116: mod_base = OTHER; note = 2'-O-methyl modified nucleotide with phosphorothioate linkage
  modified_base 117: mod_base = OTHER; note = 2'-O-methyl modified nucleotide with phosphorothioate linkage
  modified_base 118: mod_base = OTHER; note = 2'-O-methyl modified nucleotide

SEQ ID NO: 29144 - RNA, 117 nt, synthetic construct; identical to SEQ ID NO: 28582
  source 1..117: mol_type = other RNA
  modified_base 1: mod_base = OTHER; note = 2'-O-methyl modified nucleotide with phosphorothioate linkage
  modified_base 2: mod_base = OTHER; note = 2'-O-methyl modified nucleotide with phosphorothioate linkage
  modified_base 3: mod_base = OTHER; note = 2'-O-methyl modified nucleotide with phosphorothioate linkage
  modified_base 114: mod_base = OTHER; note = Nucleotide with phosphorothioate linkage
  modified_base 115: mod_base = OTHER; note = 2'-O-methyl modified nucleotide with phosphorothioate linkage
  modified_base 116: mod_base = OTHER; note = 2'-O-methyl modified nucleotide with phosphorothioate linkage
  modified_base 117: mod_base = OTHER; note = 2'-O-methyl modified nucleotide

SEQ ID NO: 29145 - RNA, 116 nt, synthetic construct; identical to SEQ ID NO: 28583
  source 1..116: mol_type = other RNA
  modified_base 1: mod_base = OTHER; note = 2'-O-methyl modified nucleotide with phosphorothioate linkage
  modified_base 2: mod_base = OTHER; note = 2'-O-methyl modified nucleotide with phosphorothioate linkage
  modified_base 3: mod_base = OTHER; note = 2'-O-methyl modified nucleotide with phosphorothioate linkage
  modified_base 113: mod_base = OTHER; note = Nucleotide with phosphorothioate linkage
  modified_base 114: mod_base = OTHER; note = 2'-O-methyl modified nucleotide with phosphorothioate linkage
  modified_base 115: mod_base = OTHER; note = 2'-O-methyl modified nucleotide with phosphorothioate linkage
  modified_base 116: mod_base = OTHER; note = 2'-O-methyl modified nucleotide

SEQ ID NO: 29146 - RNA, 128 nt, synthetic construct; identical to SEQ ID NO: 28584
  source 1..128: mol_type = other RNA
  modified_base 1: mod_base = OTHER; note = 2'-O-methyl modified nucleotide with phosphorothioate linkage
  modified_base 2: mod_base = OTHER; note = 2'-O-methyl modified nucleotide with phosphorothioate linkage
  modified_base 3: mod_base = OTHER; note = 2'-O-methyl modified nucleotide with phosphorothioate linkage
  modified_base 125: mod_base = OTHER; note = Nucleotide with phosphorothioate linkage
  modified_base 126: mod_base = OTHER; note = 2'-O-methyl modified nucleotide with phosphorothioate linkage
  modified_base 127: mod_base = OTHER; note = 2'-O-methyl modified nucleotide with phosphorothioate linkage
  modified_base 128: mod_base = OTHER; note = 2'-O-methyl modified nucleotide

SEQ ID NO: 29147 - RNA, 127 nt, synthetic construct; identical to SEQ ID NO: 28585
  source 1..127: mol_type = other RNA
  modified_base 1: mod_base = OTHER; note = 2'-O-methyl modified nucleotide with phosphorothioate linkage
  modified_base 2: mod_base = OTHER; note = 2'-O-methyl modified nucleotide with phosphorothioate linkage
  modified_base 3: mod_base = OTHER; note = 2'-O-methyl modified nucleotide with phosphorothioate linkage
  modified_base 124: mod_base = OTHER; note = Nucleotide with phosphorothioate linkage
  modified_base 125: mod_base = OTHER; note = 2'-O-methyl modified nucleotide with phosphorothioate linkage
  modified_base 126: mod_base = OTHER; note = 2'-O-methyl modified nucleotide with phosphorothioate linkage
  modified_base 127: mod_base = OTHER; note = 2'-O-methyl modified nucleotide

SEQ ID NO: 29148 - RNA, 126 nt, synthetic construct; identical to SEQ ID NO: 28586
  source 1..126: mol_type = other RNA
  modified_base 1: mod_base = OTHER; note = 2'-O-methyl modified nucleotide with phosphorothioate linkage
  modified_base 2: mod_base = OTHER; note = 2'-O-methyl modified nucleotide with phosphorothioate linkage
  modified_base 3: mod_base = OTHER; note = 2'-O-methyl modified nucleotide with phosphorothioate linkage
  modified_base 123: mod_base = OTHER; note = Nucleotide with phosphorothioate linkage
  modified_base 124: mod_base = OTHER; note = 2'-O-methyl modified nucleotide with phosphorothioate linkage
  modified_base 125: mod_base = OTHER; note = 2'-O-methyl modified nucleotide with phosphorothioate linkage
  modified_base 126: mod_base = OTHER; note = 2'-O-methyl modified nucleotide

SEQ ID NO: 29149 - RNA, 125 nt, synthetic construct; identical to SEQ ID NO: 28587
  source 1..125: mol_type = other RNA
  modified_base 1: mod_base = OTHER; note = 2'-O-methyl modified nucleotide with phosphorothioate linkage
  modified_base 2: mod_base = OTHER; note = 2'-O-methyl modified nucleotide with phosphorothioate linkage
  modified_base 3: mod_base = OTHER; note = 2'-O-methyl modified nucleotide with phosphorothioate linkage
  modified_base 122: mod_base = OTHER; note = Nucleotide with phosphorothioate linkage
  modified_base 123: mod_base = OTHER; note = 2'-O-methyl modified nucleotide with phosphorothioate linkage
  modified_base 124: mod_base = OTHER; note = 2'-O-methyl modified nucleotide with phosphorothioate linkage
  modified_base 125: mod_base = OTHER; note = 2'-O-methyl modified nucleotide

SEQ ID NO: 29150 - RNA, 124 nt, synthetic construct; identical to SEQ ID NO: 28588
  source 1..124: mol_type = other RNA
  modified_base 1: mod_base = OTHER; note = 2'-O-methyl modified nucleotide with phosphorothioate linkage
  modified_base 2: mod_base = OTHER; note = 2'-O-methyl modified nucleotide with phosphorothioate linkage
  modified_base 3: mod_base = OTHER; note = 2'-O-methyl modified nucleotide with phosphorothioate linkage
  modified_base 121: mod_base = OTHER; note = Nucleotide with phosphorothioate linkage
  modified_base 122: mod_base = OTHER; note = 2'-O-methyl modified nucleotide with phosphorothioate linkage
  modified_base 123: mod_base = OTHER; note = 2'-O-methyl modified nucleotide with phosphorothioate linkage
  modified_base 124: mod_base = OTHER; note = 2'-O-methyl modified nucleotide

SEQ ID NO: 29151 - RNA, 123 nt, synthetic construct; identical to SEQ ID NO: 28589
  source 1..123: mol_type = other RNA
  modified_base 1: mod_base = OTHER; note = 2'-O-methyl modified nucleotide with phosphorothioate linkage
  modified_base 2: mod_base = OTHER; note = 2'-O-methyl modified nucleotide with phosphorothioate linkage
  modified_base 3: mod_base = OTHER; note = 2'-O-methyl modified nucleotide with phosphorothioate linkage
  modified_base 120: mod_base = OTHER; note = Nucleotide with phosphorothioate linkage
  modified_base 121: mod_base = OTHER; note = 2'-O-methyl modified nucleotide with phosphorothioate linkage
  modified_base 122: mod_base = OTHER; note = 2'-O-methyl modified nucleotide with phosphorothioate linkage
  modified_base 123: mod_base = OTHER; note = 2'-O-methyl modified nucleotide

SEQ ID NO: 29152 - RNA, 122 nt, synthetic construct; identical to SEQ ID NO: 28590
  source 1..122: mol_type = other RNA
  modified_base 1: mod_base = OTHER; note = 2'-O-methyl modified nucleotide with phosphorothioate linkage
  modified_base 2: mod_base = OTHER; note = 2'-O-methyl modified nucleotide with phosphorothioate linkage
  modified_base 3: mod_base = OTHER; note = 2'-O-methyl modified nucleotide with phosphorothioate linkage
  modified_base 119: mod_base = OTHER; note = Nucleotide with phosphorothioate linkage
  modified_base 120: mod_base = OTHER; note = 2'-O-methyl modified nucleotide with phosphorothioate linkage
  modified_base 121: mod_base = OTHER; note = 2'-O-methyl modified nucleotide with phosphorothioate linkage
  modified_base 122: mod_base = OTHER; note = 2'-O-methyl modified nucleotide

SEQ ID NO: 29153 - RNA, 121 nt, synthetic construct; identical to SEQ ID NO: 28591
  source 1..121: mol_type = other RNA
  modified_base 1: mod_base = OTHER; note = 2'-O-methyl modified nucleotide with phosphorothioate linkage
  modified_base 2: mod_base = OTHER; note = 2'-O-methyl modified nucleotide with phosphorothioate linkage
  modified_base 3: mod_base = OTHER; note = 2'-O-methyl modified nucleotide with phosphorothioate linkage
  modified_base 118: mod_base = OTHER; note = Nucleotide with phosphorothioate linkage
  modified_base 119: mod_base = OTHER; note = 2'-O-methyl modified nucleotide with phosphorothioate linkage
  modified_base 120: mod_base = OTHER; note = 2'-O-methyl modified nucleotide with phosphorothioate linkage
  modified_base 121: mod_base = OTHER; note = 2'-O-methyl modified nucleotide

SEQ ID NO: 29154 - RNA, 120 nt, synthetic construct; identical to SEQ ID NO: 28592
  source 1..120: mol_type = other RNA
  modified_base 1: mod_base = OTHER; note = 2'-O-methyl modified nucleotide with phosphorothioate linkage
  modified_base 2: mod_base = OTHER; note = 2'-O-methyl modified nucleotide with phosphorothioate linkage
  modified_base 3: mod_base = OTHER; note = 2'-O-methyl modified nucleotide with phosphorothioate linkage
  modified_base 117: mod_base = OTHER; note = Nucleotide with phosphorothioate linkage
  modified_base 118: mod_base = OTHER; note = 2'-O-methyl modified nucleotide with phosphorothioate linkage
  modified_base 119: mod_base = OTHER; note = 2'-O-methyl modified nucleotide with phosphorothioate linkage
  modified_base 120: mod_base = OTHER; note = 2'-O-methyl modified nucleotide

SEQ ID NO: 29155 - RNA, 119 nt, synthetic construct; identical to SEQ ID NO: 28593
  source 1..119: mol_type = other RNA
  modified_base 1: mod_base = OTHER; note = 2'-O-methyl modified nucleotide with phosphorothioate linkage
  modified_base 2: mod_base = OTHER; note = 2'-O-methyl modified nucleotide with phosphorothioate linkage
  modified_base 3: mod_base = OTHER; note = 2'-O-methyl modified nucleotide with phosphorothioate linkage
  modified_base 116: mod_base = OTHER; note = Nucleotide with phosphorothioate linkage
  modified_base 117: mod_base = OTHER; note = 2'-O-methyl modified nucleotide with phosphorothioate linkage
  modified_base 118: mod_base = OTHER; note = 2'-O-methyl modified nucleotide with phosphorothioate linkage
  modified_base 119: mod_base = OTHER; note = 2'-O-methyl modified nucleotide

SEQ ID NO: 29156 - RNA, 118 nt, synthetic construct; identical to SEQ ID NO: 28594
  source 1..118: mol_type = other RNA
  modified_base 1: mod_base = OTHER; note = 2'-O-methyl modified nucleotide with phosphorothioate linkage
  modified_base 2: mod_base = OTHER; note = 2'-O-methyl modified nucleotide with phosphorothioate linkage
  modified_base 3: mod_base = OTHER; note = 2'-O-methyl modified nucleotide with phosphorothioate linkage
  modified_base 115: mod_base = OTHER; note = Nucleotide with phosphorothioate linkage
  modified_base 116: mod_base = OTHER; note = 2'-O-methyl modified nucleotide with phosphorothioate linkage
  modified_base 117: mod_base = OTHER; note = 2'-O-methyl modified nucleotide with phosphorothioate linkage
  modified_base 118: mod_base = OTHER; note = 2'-O-methyl modified nucleotide

SEQ ID NO: 29157 - RNA, 117 nt, synthetic construct; identical to SEQ ID NO: 28595
  source 1..117: mol_type = other RNA
  modified_base 1: mod_base = OTHER; note = 2'-O-methyl modified nucleotide with phosphorothioate linkage
  modified_base 2: mod_base = OTHER; note = 2'-O-methyl modified nucleotide with phosphorothioate linkage
  modified_base 3: mod_base = OTHER; note = 2'-O-methyl modified nucleotide with phosphorothioate linkage
  modified_base 114: mod_base = OTHER; note = Nucleotide with phosphorothioate linkage
  modified_base 115: mod_base = OTHER; note = 2'-O-methyl modified nucleotide with phosphorothioate linkage
  modified_base 116: mod_base = OTHER; note = 2'-O-methyl modified nucleotide with phosphorothioate linkage
  modified_base 117: mod_base = OTHER; note = 2'-O-methyl modified nucleotide

SEQ ID NO: 29158 - RNA, 129 nt, synthetic construct; identical to SEQ ID NO: 28596
  source 1..129: mol_type = other RNA
  modified_base 1: mod_base = OTHER; note = 2'-O-methyl modified nucleotide with phosphorothioate linkage
  modified_base 2: mod_base = OTHER; note = 2'-O-methyl modified nucleotide with phosphorothioate linkage
  modified_base 3: mod_base = OTHER; note = 2'-O-methyl modified nucleotide with phosphorothioate linkage
  modified_base 126: mod_base = OTHER; note = Nucleotide with phosphorothioate linkage
  modified_base 127: mod_base = OTHER; note = 2'-O-methyl modified nucleotide with phosphorothioate linkage
  modified_base 128: mod_base = OTHER; note = 2'-O-methyl modified nucleotide with phosphorothioate linkage
  modified_base 129: mod_base = OTHER; note = 2'-O-methyl modified nucleotide

SEQ ID NO: 29159 - RNA, 128 nt, synthetic construct; identical to SEQ ID NO: 28597
  source 1..128: mol_type = other RNA
  modified_base 1: mod_base = OTHER; note = 2'-O-methyl modified nucleotide with phosphorothioate linkage
  modified_base 2: mod_base = OTHER; note = 2'-O-methyl modified nucleotide with phosphorothioate linkage
  modified_base 3: mod_base = OTHER; note = 2'-O-methyl modified nucleotide with phosphorothioate linkage
  modified_base 125: mod_base = OTHER; note = Nucleotide with phosphorothioate linkage
  modified_base 126: mod_base = OTHER; note = 2'-O-methyl modified nucleotide with phosphorothioate linkage
  modified_base 127: mod_base = OTHER; note = 2'-O-methyl modified nucleotide with phosphorothioate linkage
  modified_base 128: mod_base = OTHER; note = 2'-O-methyl modified nucleotide

SEQ ID NO: 29160 - RNA, 127 nt, synthetic construct; identical to SEQ ID NO: 28598
  source 1..127: mol_type = other RNA
  modified_base 1: mod_base = OTHER; note = 2'-O-methyl modified nucleotide with phosphorothioate linkage
  modified_base 2: mod_base = OTHER; note = 2'-O-methyl modified nucleotide with phosphorothioate linkage
  modified_base 3: mod_base = OTHER; note = 2'-O-methyl modified nucleotide with phosphorothioate linkage
  modified_base 124: mod_base = OTHER; note = Nucleotide with phosphorothioate linkage
  modified_base 125: mod_base = OTHER; note = 2'-O-methyl modified nucleotide with phosphorothioate linkage
  modified_base 126: mod_base = OTHER; note = 2'-O-methyl modified nucleotide with phosphorothioate linkage
  modified_base 127: mod_base = OTHER; note = 2'-O-methyl modified nucleotide

SEQ ID NO: 29161 - RNA, 126 nt, synthetic construct; identical to SEQ ID NO: 28599
  source 1..126: mol_type = other RNA
  modified_base 1: mod_base = OTHER; note = 2'-O-methyl modified nucleotide with phosphorothioate linkage
  modified_base 2: mod_base = OTHER; note = 2'-O-methyl modified nucleotide with phosphorothioate linkage
  modified_base 3: mod_base = OTHER; note = 2'-O-methyl modified nucleotide with phosphorothioate linkage
  modified_base 123: mod_base = OTHER; note = Nucleotide with phosphorothioate linkage
  modified_base 124: mod_base = OTHER; note = 2'-O-methyl modified nucleotide with phosphorothioate linkage
  modified_base 125: mod_base = OTHER; note = 2'-O-methyl modified nucleotide with phosphorothioate linkage
  modified_base 126: mod_base = OTHER; note = 2'-O-methyl modified nucleotide

SEQ ID NO: 29162 - RNA, 125 nt, synthetic construct; identical to SEQ ID NO: 28600
  source 1..125: mol_type = other RNA
  modified_base 1: mod_base = OTHER; note = 2'-O-methyl modified nucleotide with phosphorothioate linkage
  modified_base 2: mod_base = OTHER; note = 2'-O-methyl modified nucleotide with phosphorothioate linkage
  modified_base 3: mod_base = OTHER; note = 2'-O-methyl modified nucleotide with phosphorothioate linkage
  modified_base 122: mod_base = OTHER; note = Nucleotide with phosphorothioate linkage
  modified_base 123: mod_base = OTHER; note = 2'-O-methyl modified nucleotide with phosphorothioate linkage
  modified_base 124: mod_base = OTHER; note = 2'-O-methyl modified nucleotide with phosphorothioate linkage
  modified_base 125: mod_base = OTHER; note = 2'-O-methyl modified nucleotide

SEQ ID NO: 29163 - RNA, 124 nt, synthetic construct; identical to SEQ ID NO: 28601
  source 1..124: mol_type = other RNA
  modified_base 1: mod_base = OTHER; note = 2'-O-methyl modified nucleotide with phosphorothioate linkage
  modified_base 2: mod_base = OTHER; note = 2'-O-methyl modified nucleotide with phosphorothioate linkage
  modified_base 3: mod_base = OTHER; note = 2'-O-methyl modified nucleotide with phosphorothioate linkage
  modified_base 121: mod_base = OTHER; note = Nucleotide with phosphorothioate linkage
  modified_base 122: mod_base = OTHER; note = 2'-O-methyl modified nucleotide with phosphorothioate linkage
  modified_base 123: mod_base = OTHER; note = 2'-O-methyl modified nucleotide with phosphorothioate linkage
  modified_base 124: mod_base = OTHER; note = 2'-O-methyl modified nucleotide

SEQ ID NO: 29164 - RNA, 123 nt, synthetic construct; identical to SEQ ID NO: 28602
  source 1..123: mol_type = other RNA
  modified_base 1: mod_base = OTHER; note = 2'-O-methyl modified nucleotide with phosphorothioate linkage
  modified_base 2: mod_base = OTHER; note = 2'-O-methyl modified nucleotide with phosphorothioate linkage
  modified_base 3: mod_base = OTHER; note = 2'-O-methyl modified nucleotide with phosphorothioate linkage
  modified_base 120: mod_base = OTHER; note = Nucleotide with phosphorothioate linkage
  modified_base 121: mod_base = OTHER; note = 2'-O-methyl modified nucleotide with phosphorothioate linkage
  modified_base 122: mod_base = OTHER; note = 2'-O-methyl modified nucleotide with phosphorothioate linkage
  modified_base 123: mod_base = OTHER; note = 2'-O-methyl modified nucleotide

SEQ ID NO: 29165 - RNA, 122 nt, synthetic construct; identical to SEQ ID NO: 28603
  source 1..122: mol_type = other RNA
  modified_base 1: mod_base = OTHER; note = 2'-O-methyl modified nucleotide with phosphorothioate linkage
  modified_base 2: mod_base = OTHER; note = 2'-O-methyl modified nucleotide with phosphorothioate linkage
  modified_base 3: mod_base = OTHER; note = 2'-O-methyl modified nucleotide with phosphorothioate linkage
  modified_base 119: mod_base = OTHER; note = Nucleotide with phosphorothioate linkage
  modified_base 120: mod_base = OTHER; note = 2'-O-methyl modified nucleotide with phosphorothioate linkage
  modified_base 121: mod_base = OTHER; note = 2'-O-methyl modified nucleotide with phosphorothioate linkage
  modified_base 122: mod_base = OTHER; note = 2'-O-methyl modified nucleotide

SEQ ID NO: 29166 - RNA, 121 nt, synthetic construct; identical to SEQ ID NO: 28604
  source 1..121: mol_type = other RNA
  modified_base 1: mod_base = OTHER; note = 2'-O-methyl modified nucleotide with phosphorothioate linkage
  modified_base 2: mod_base = OTHER; note = 2'-O-methyl modified nucleotide with phosphorothioate linkage
  modified_base 3: mod_base = OTHER; note = 2'-O-methyl modified nucleotide with phosphorothioate linkage
  modified_base 118: mod_base = OTHER; note = Nucleotide with phosphorothioate linkage
  modified_base 119: mod_base = OTHER; note = 2'-O-methyl modified nucleotide with phosphorothioate linkage
  modified_base 120: mod_base = OTHER; note = 2'-O-methyl modified nucleotide with phosphorothioate linkage
  modified_base 121: mod_base = OTHER; note = 2'-O-methyl modified nucleotide

SEQ ID NO: 29167 - RNA, 120 nt, synthetic construct; identical to SEQ ID NO: 28605
  source 1..120: mol_type = other RNA
  modified_base 1: mod_base = OTHER; note = 2'-O-methyl modified nucleotide with phosphorothioate linkage
  modified_base 2: mod_base = OTHER; note = 2'-O-methyl modified nucleotide with phosphorothioate linkage
  modified_base 3: mod_base = OTHER; note = 2'-O-methyl modified nucleotide with phosphorothioate linkage
  modified_base 117: mod_base = OTHER; note = Nucleotide with phosphorothioate linkage
  modified_base 118: mod_base = OTHER; note = 2'-O-methyl modified nucleotide with phosphorothioate linkage
  modified_base 119: mod_base = OTHER; note = 2'-O-methyl modified nucleotide with phosphorothioate linkage
  modified_base 120: mod_base = OTHER; note = 2'-O-methyl modified nucleotide

SEQ ID NO: 29168 - RNA, 119 nt, synthetic construct; identical to SEQ ID NO: 28606
  source 1..119: mol_type = other RNA
  modified_base 1: mod_base = OTHER; note = 2'-O-methyl modified nucleotide with phosphorothioate linkage
  modified_base 2: mod_base = OTHER; note = 2'-O-methyl modified nucleotide with phosphorothioate linkage
  modified_base 3: mod_base = OTHER; note = 2'-O-methyl modified nucleotide with phosphorothioate linkage
  modified_base 116: mod_base = OTHER; note = Nucleotide with phosphorothioate linkage
  modified_base 117: mod_base = OTHER; note = 2'-O-methyl modified nucleotide with phosphorothioate linkage
  modified_base 118: mod_base = OTHER; note = 2'-O-methyl modified nucleotide with phosphorothioate linkage
  modified_base 119: mod_base = OTHER; note = 2'-O-methyl modified nucleotide

SEQ ID NO: 29169 - RNA, 118 nt, synthetic construct; identical to SEQ ID NO: 28607
  source 1..118: mol_type = other RNA
  modified_base 1: mod_base = OTHER; note = 2'-O-methyl modified nucleotide with phosphorothioate linkage
  modified_base 2: mod_base = OTHER; note = 2'-O-methyl modified nucleotide with phosphorothioate linkage
  modified_base 3: mod_base = OTHER; note = 2'-O-methyl modified nucleotide with phosphorothioate linkage
  modified_base 115: mod_base = OTHER; note = Nucleotide with phosphorothioate linkage
  modified_base 116: mod_base = OTHER; note = 2'-O-methyl modified nucleotide with phosphorothioate linkage
  modified_base 117: mod_base = OTHER; note = 2'-O-methyl modified nucleotide with phosphorothioate linkage
  modified_base 118: mod_base = OTHER; note = 2'-O-methyl modified nucleotide

SEQ ID NO: 29170 - RNA, 130 nt, synthetic construct; identical to SEQ ID NO: 28608
  source 1..130: mol_type = other RNA
  modified_base 1: mod_base = OTHER; note = 2'-O-methyl modified nucleotide with phosphorothioate linkage
  modified_base 2: mod_base = OTHER; note = 2'-O-methyl modified nucleotide with phosphorothioate linkage
  modified_base 3: mod_base = OTHER; note = 2'-O-methyl modified nucleotide with phosphorothioate linkage
  modified_base 127: mod_base = OTHER; note = Nucleotide with phosphorothioate linkage
  modified_base 128: mod_base = OTHER; note = 2'-O-methyl modified nucleotide with phosphorothioate linkage
  modified_base 129: mod_base = OTHER; note = 2'-O-methyl modified nucleotide with phosphorothioate linkage
  modified_base 130: mod_base = OTHER; note = 2'-O-methyl modified nucleotide

SEQ ID NO: 29171 - RNA, 129 nt, synthetic construct; identical to SEQ ID NO: 28609
  source 1..129: mol_type = other RNA
  modified_base 1: mod_base = OTHER; note = 2'-O-methyl modified nucleotide with phosphorothioate linkage
  modified_base 2: mod_base = OTHER; note = 2'-O-methyl modified nucleotide with phosphorothioate linkage
  modified_base 3: mod_base = OTHER; note = 2'-O-methyl modified nucleotide with phosphorothioate linkage
  modified_base 126: mod_base = OTHER; note = Nucleotide with phosphorothioate linkage
  modified_base 127: mod_base = OTHER; note = 2'-O-methyl modified nucleotide with phosphorothioate linkage
  modified_base 128: mod_base = OTHER; note = 2'-O-methyl modified nucleotide with phosphorothioate linkage
  modified_base 129: mod_base = OTHER; note = 2'-O-methyl modified nucleotide

SEQ ID NO: 29172 - RNA, 128 nt, synthetic construct; identical to SEQ ID NO: 28610
  source 1..128: mol_type = other RNA
  modified_base 1: mod_base = OTHER; note = 2'-O-methyl modified nucleotide with phosphorothioate linkage
  modified_base 2: mod_base = OTHER; note = 2'-O-methyl modified nucleotide with phosphorothioate linkage
  modified_base 3: mod_base = OTHER; note = 2'-O-methyl modified nucleotide with phosphorothioate linkage
  modified_base 125: mod_base = OTHER; note = Nucleotide with phosphorothioate linkage
  modified_base 126: mod_base = OTHER; note = 2'-O-methyl modified nucleotide with phosphorothioate linkage
  modified_base 127: mod_base = OTHER; note = 2'-O-methyl modified nucleotide with phosphorothioate linkage
  modified_base 128: mod_base = OTHER; note = 2'-O-methyl modified nucleotide

SEQ ID NO: 29173 - RNA, 127 nt, synthetic construct; identical to SEQ ID NO: 28611
  source 1..127: mol_type = other RNA
  modified_base 1: mod_base = OTHER; note = 2'-O-methyl modified nucleotide with phosphorothioate linkage
  modified_base 2: mod_base = OTHER; note = 2'-O-methyl modified nucleotide with phosphorothioate linkage
  modified_base 3: mod_base = OTHER; note = 2'-O-methyl modified nucleotide with phosphorothioate linkage
  modified_base 124: mod_base = OTHER; note = Nucleotide with phosphorothioate linkage
  modified_base 125: mod_base = OTHER; note = 2'-O-methyl modified nucleotide with phosphorothioate linkage
  modified_base 126: mod_base = OTHER; note = 2'-O-methyl modified nucleotide with phosphorothioate linkage
  modified_base 127: mod_base = OTHER; note = 2'-O-methyl modified nucleotide

SEQ ID NO: 29174 - RNA, 126 nt, synthetic construct; identical to SEQ ID NO: 28612
  source 1..126: mol_type = other RNA
  modified_base 1: mod_base = OTHER; note = 2'-O-methyl modified nucleotide with phosphorothioate linkage
  modified_base 2: mod_base = OTHER; note = 2'-O-methyl modified nucleotide with phosphorothioate linkage
  modified_base 3: mod_base = OTHER; note = 2'-O-methyl modified nucleotide with phosphorothioate linkage
  modified_base 123: mod_base = OTHER; note = Nucleotide with phosphorothioate linkage
  modified_base 124: mod_base = OTHER; note = 2'-O-methyl modified nucleotide with phosphorothioate linkage
  modified_base 125: mod_base = OTHER; note = 2'-O-methyl modified nucleotide with phosphorothioate linkage
  modified_base 126: mod_base = OTHER; note = 2'-O-methyl modified nucleotide

SEQ ID NO: 29175 - RNA, 125 nt, synthetic construct; identical to SEQ ID NO: 28613
  source 1..125: mol_type = other RNA
  modified_base 1: mod_base = OTHER; note = 2'-O-methyl modified nucleotide with phosphorothioate linkage
  modified_base 2: mod_base = OTHER; note = 2'-O-methyl modified nucleotide with phosphorothioate linkage
  modified_base 3: mod_base = OTHER; note = 2'-O-methyl modified nucleotide with phosphorothioate linkage
  modified_base 122: mod_base = OTHER; note = Nucleotide with phosphorothioate linkage
  modified_base 123: mod_base = OTHER; note = 2'-O-methyl modified nucleotide with phosphorothioate linkage
  modified_base 124: mod_base = OTHER; note = 2'-O-methyl modified nucleotide with phosphorothioate linkage
  modified_base 125: mod_base = OTHER; note = 2'-O-methyl modified nucleotide

SEQ ID NO: 29176 - RNA, 124 nt, synthetic construct; identical to SEQ ID NO: 28614
  source 1..124: mol_type = other RNA
  modified_base 1: mod_base = OTHER; note = 2'-O-methyl modified nucleotide with phosphorothioate linkage
  modified_base 2: mod_base = OTHER; note = 2'-O-methyl modified nucleotide with phosphorothioate linkage
  modified_base 3: mod_base = OTHER; note = 2'-O-methyl modified nucleotide with phosphorothioate linkage
  modified_base 121: mod_base = OTHER; note = Nucleotide with phosphorothioate linkage
  modified_base 122: mod_base = OTHER; note = 2'-O-methyl modified nucleotide with phosphorothioate linkage
  modified_base 123: mod_base = OTHER; note = 2'-O-methyl modified nucleotide with phosphorothioate linkage
  modified_base 124: mod_base = OTHER; note = 2'-O-methyl modified nucleotide

SEQ ID NO: 29177 - RNA, 123 nt, synthetic construct; identical to SEQ ID NO: 28615
  source 1..123: mol_type = other RNA
  modified_base 1: mod_base = OTHER; note = 2'-O-methyl modified nucleotide with phosphorothioate linkage
  modified_base 2: mod_base = OTHER; note = 2'-O-methyl modified nucleotide with phosphorothioate linkage
  modified_base 3: mod_base = OTHER; note = 2'-O-methyl modified nucleotide with phosphorothioate linkage
  modified_base 120: mod_base = OTHER; note = Nucleotide with phosphorothioate linkage
  modified_base 121: mod_base = OTHER; note = 2'-O-methyl modified nucleotide with phosphorothioate linkage
  modified_base 122: mod_base = OTHER; note = 2'-O-methyl modified nucleotide with phosphorothioate linkage
  modified_base 123: mod_base = OTHER; note = 2'-O-methyl modified nucleotide

SEQ ID NO: 29178 - RNA, 122 nt, synthetic construct; identical to SEQ ID NO: 28616
  source 1..122: mol_type = other RNA
  modified_base 1: mod_base = OTHER; note = 2'-O-methyl modified nucleotide with phosphorothioate linkage
  modified_base 2: mod_base = OTHER; note = 2'-O-methyl modified nucleotide with phosphorothioate linkage
  modified_base 3: mod_base = OTHER; note = 2'-O-methyl modified nucleotide with phosphorothioate linkage
  modified_base 119: mod_base = OTHER; note = Nucleotide with phosphorothioate linkage
  modified_base 120: mod_base = OTHER; note = 2'-O-methyl modified nucleotide with phosphorothioate linkage
  modified_base 121: mod_base = OTHER; note = 2'-O-methyl modified nucleotide with phosphorothioate linkage
  modified_base 122: mod_base = OTHER; note = 2'-O-methyl modified nucleotide

SEQ ID NO: 29179 - RNA, 121 nt, synthetic construct; identical to SEQ ID NO: 28617
  source 1..121: mol_type = other RNA
  modified_base 1: mod_base = OTHER; note = 2'-O-methyl modified nucleotide with phosphorothioate linkage
  modified_base 2: mod_base = OTHER; note = 2'-O-methyl modified nucleotide with phosphorothioate linkage
  modified_base 3: mod_base = OTHER; note = 2'-O-methyl modified nucleotide with phosphorothioate linkage
  modified_base 118: mod_base = OTHER; note = Nucleotide with phosphorothioate linkage
  modified_base 119: mod_base = OTHER; note = 2'-O-methyl modified nucleotide with phosphorothioate linkage
  modified_base 120: mod_base = OTHER; note = 2'-O-methyl modified nucleotide with phosphorothioate linkage
  modified_base 121: mod_base = OTHER; note = 2'-O-methyl modified nucleotide

SEQ ID NO: 29180 - RNA, 120 nt, synthetic construct; identical to SEQ ID NO: 28618
  source 1..120: mol_type = other RNA
  modified_base 1: mod_base = OTHER; note = 2'-O-methyl modified nucleotide with phosphorothioate linkage
  modified_base 2: mod_base = OTHER; note = 2'-O-methyl modified nucleotide with phosphorothioate linkage
  modified_base 3: mod_base = OTHER; note = 2'-O-methyl modified nucleotide with phosphorothioate linkage
  modified_base 117: mod_base = OTHER; note = Nucleotide with phosphorothioate linkage
  modified_base 118: mod_base = OTHER; note = 2'-O-methyl modified nucleotide with phosphorothioate linkage
  modified_base 119: mod_base = OTHER; note = 2'-O-methyl modified nucleotide with phosphorothioate linkage
  modified_base 120: mod_base = OTHER; note = 2'-O-methyl modified nucleotide

SEQ ID NO: 29181 - RNA, 119 nt, synthetic construct; identical to SEQ ID NO: 28619
  source 1..119: mol_type = other RNA
  modified_base 1: mod_base = OTHER; note = 2'-O-methyl modified nucleotide with phosphorothioate linkage
  modified_base 2: mod_base = OTHER; note = 2'-O-methyl modified nucleotide with phosphorothioate linkage
  modified_base 3: mod_base = OTHER; note = 2'-O-methyl modified nucleotide with phosphorothioate linkage
  modified_base 116: mod_base = OTHER; note = Nucleotide with phosphorothioate linkage
  modified_base 117: mod_base = OTHER; note = 2'-O-methyl modified nucleotide with phosphorothioate linkage
  modified_base 118: mod_base = OTHER; note = 2'-O-methyl modified nucleotide with phosphorothioate linkage
  modified_base 119: mod_base = OTHER; note = 2'-O-methyl modified nucleotide

SEQ ID NO: 29182 - RNA, 131 nt, synthetic construct; identical to SEQ ID NO: 28620
  source 1..131: mol_type = other RNA
  modified_base 1: mod_base = OTHER; note = 2'-O-methyl modified nucleotide with phosphorothioate linkage
  modified_base 2: mod_base = OTHER; note = 2'-O-methyl modified nucleotide with phosphorothioate linkage
  modified_base 3: mod_base = OTHER; note = 2'-O-methyl modified nucleotide with phosphorothioate linkage
  modified_base 128: mod_base = OTHER; note = Nucleotide with phosphorothioate linkage
  modified_base 129: mod_base = OTHER; note = 2'-O-methyl modified nucleotide with phosphorothioate linkage
  modified_base 130: mod_base = OTHER; note = 2'-O-methyl modified nucleotide with phosphorothioate linkage
  modified_base 131: mod_base = OTHER; note = 2'-O-methyl modified nucleotide

SEQ ID NO: 29183 - RNA, 130 nt, synthetic construct; identical to SEQ ID NO: 28621
  source 1..130: mol_type = other RNA
  modified_base 1: mod_base = OTHER; note = 2'-O-methyl modified nucleotide with phosphorothioate linkage
  modified_base 2: mod_base = OTHER; note = 2'-O-methyl modified nucleotide with phosphorothioate linkage
  modified_base 3: mod_base = OTHER; note = 2'-O-methyl modified nucleotide with phosphorothioate linkage
  modified_base 127: mod_base = OTHER; note = Nucleotide with phosphorothioate linkage
  modified_base 128: mod_base = OTHER; note = 2'-O-methyl modified nucleotide with phosphorothioate linkage
  modified_base 129: mod_base = OTHER; note = 2'-O-methyl modified nucleotide with phosphorothioate linkage
  modified_base 130: mod_base = OTHER; note = 2'-O-methyl modified nucleotide

SEQ ID NO: 29184 - RNA, 129 nt, synthetic construct; identical to SEQ ID NO: 28622
  source 1..129: mol_type = other RNA
  modified_base 1: mod_base = OTHER; note = 2'-O-methyl modified nucleotide with phosphorothioate linkage
  modified_base 2: mod_base = OTHER; note = 2'-O-methyl modified nucleotide with phosphorothioate linkage
  modified_base 3: mod_base = OTHER; note = 2'-O-methyl modified nucleotide with phosphorothioate linkage
  modified_base 126: mod_base = OTHER; note = Nucleotide with phosphorothioate linkage
  modified_base 127: mod_base = OTHER; note = 2'-O-methyl modified nucleotide with phosphorothioate linkage
  modified_base 128: mod_base = OTHER; note = 2'-O-methyl modified nucleotide with phosphorothioate linkage
  modified_base 129: mod_base = OTHER; note = 2'-O-methyl modified nucleotide

SEQ ID NO: 29185 - RNA, 128 nt, synthetic construct; identical to SEQ ID NO: 28623
  source 1..128: mol_type = other RNA
  modified_base 1: mod_base = OTHER; note = 2'-O-methyl modified nucleotide with phosphorothioate linkage
  modified_base 2: mod_base = OTHER; note = 2'-O-methyl modified nucleotide with phosphorothioate linkage
  modified_base 3: mod_base = OTHER; note = 2'-O-methyl modified nucleotide with phosphorothioate linkage
  modified_base 125: mod_base = OTHER; note = Nucleotide with phosphorothioate linkage
  modified_base 126: mod_base = OTHER; note = 2'-O-methyl modified nucleotide with phosphorothioate linkage
  modified_base 127: mod_base = OTHER; note = 2'-O-methyl modified nucleotide with phosphorothioate linkage
  modified_base 128: mod_base = OTHER; note = 2'-O-methyl modified nucleotide

SEQ ID NO: 29186 - RNA, 127 nt, synthetic construct; identical to SEQ ID NO: 28624
  source 1..127: mol_type = other RNA
  modified_base 1: mod_base = OTHER; note = 2'-O-methyl modified nucleotide with phosphorothioate linkage
  modified_base 2: mod_base = OTHER; note = 2'-O-methyl modified nucleotide with phosphorothioate linkage
  modified_base 3: mod_base = OTHER; note = 2'-O-methyl modified nucleotide with phosphorothioate linkage
  modified_base 124: mod_base = OTHER; note = Nucleotide with phosphorothioate linkage
  modified_base 125: mod_base = OTHER; note = 2'-O-methyl modified nucleotide with phosphorothioate linkage
  modified_base 126: mod_base = OTHER; note = 2'-O-methyl modified nucleotide with phosphorothioate linkage
  modified_base 127: mod_base = OTHER; note = 2'-O-methyl modified nucleotide

SEQ ID NO: 29187 - RNA, 126 nt, synthetic construct; identical to SEQ ID NO: 28625
  source 1..126: mol_type = other RNA
  modified_base 1: mod_base = OTHER; note = 2'-O-methyl modified nucleotide with phosphorothioate linkage
  modified_base 2: mod_base = OTHER; note = 2'-O-methyl modified nucleotide with phosphorothioate linkage
  modified_base 3: mod_base = OTHER; note = 2'-O-methyl modified nucleotide with phosphorothioate linkage
  modified_base 123: mod_base = OTHER; note = Nucleotide with phosphorothioate linkage
  modified_base 124: mod_base = OTHER; note = 2'-O-methyl modified nucleotide with phosphorothioate linkage
  modified_base 125: mod_base = OTHER; note = 2'-O-methyl modified nucleotide with phosphorothioate linkage
  modified_base 126: mod_base = OTHER; note = 2'-O-methyl modified nucleotide

SEQ ID NO: 29188 - RNA, 125 nt, synthetic construct; identical to SEQ ID NO: 28626
  source 1..125: mol_type = other RNA
  modified_base 1: mod_base = OTHER; note = 2'-O-methyl modified nucleotide with phosphorothioate linkage
  modified_base 2: mod_base = OTHER; note = 2'-O-methyl modified nucleotide with phosphorothioate linkage
  modified_base 3: mod_base = OTHER; note = 2'-O-methyl modified nucleotide with phosphorothioate linkage
  modified_base 122: mod_base = OTHER; note = Nucleotide with phosphorothioate linkage
  modified_base 123: mod_base = OTHER; note = 2'-O-methyl modified nucleotide with phosphorothioate linkage
  modified_base 124: mod_base = OTHER; note = 2'-O-methyl modified nucleotide with phosphorothioate linkage
  modified_base 125: mod_base = OTHER; note = 2'-O-methyl modified nucleotide

SEQ ID NO: 29189 - RNA, 124 nt, synthetic construct; identical to SEQ ID NO: 28627
  source 1..124: mol_type = other RNA
  modified_base 1: mod_base = OTHER; note = 2'-O-methyl modified nucleotide with phosphorothioate linkage
  modified_base 2: mod_base = OTHER; note = 2'-O-methyl modified nucleotide with phosphorothioate linkage
  modified_base 3: mod_base = OTHER; note = 2'-O-methyl modified nucleotide with phosphorothioate linkage
  modified_base 121: mod_base = OTHER; note = Nucleotide with phosphorothioate linkage
  modified_base 122: mod_base = OTHER; note = 2'-O-methyl modified nucleotide with phosphorothioate linkage
  modified_base 123: mod_base = OTHER; note = 2'-O-methyl modified nucleotide with phosphorothioate linkage
  modified_base 124: mod_base = OTHER; note = 2'-O-methyl modified nucleotide

SEQ ID NO: 29190 - RNA, 123 nt, synthetic construct; identical to SEQ ID NO: 28628
  source 1..123: mol_type = other RNA
  modified_base 1: mod_base = OTHER; note = 2'-O-methyl modified nucleotide with phosphorothioate linkage
  modified_base 2: mod_base = OTHER; note = 2'-O-methyl modified nucleotide with phosphorothioate linkage
  modified_base 3: mod_base = OTHER; note = 2'-O-methyl modified nucleotide with phosphorothioate linkage
  modified_base 120: mod_base = OTHER; note = Nucleotide with phosphorothioate linkage
  modified_base 121: mod_base = OTHER; note = 2'-O-methyl modified nucleotide with phosphorothioate linkage
  modified_base 122: mod_base = OTHER; note = 2'-O-methyl modified nucleotide with phosphorothioate linkage
  modified_base 123: mod_base = OTHER; note = 2'-O-methyl modified nucleotide

SEQ ID NO: 29191 - RNA, 122 nt, synthetic construct; identical to SEQ ID NO: 28629
  source 1..122: mol_type = other RNA
  modified_base 1: mod_base = OTHER; note = 2'-O-methyl modified nucleotide with phosphorothioate linkage
  modified_base 2: mod_base = OTHER; note = 2'-O-methyl modified nucleotide with phosphorothioate linkage
  modified_base 3: mod_base = OTHER; note = 2'-O-methyl modified nucleotide with phosphorothioate linkage
  modified_base 119: mod_base = OTHER; note = Nucleotide with phosphorothioate linkage
  modified_base 120: mod_base = OTHER; note = 2'-O-methyl modified nucleotide with phosphorothioate linkage
  modified_base 121: mod_base = OTHER; note = 2'-O-methyl modified nucleotide with phosphorothioate linkage
  modified_base 122: mod_base = OTHER; note = 2'-O-methyl modified nucleotide

SEQ ID NO: 29192 - RNA, 121 nt, synthetic construct; identical to SEQ ID NO: 28630
  source 1..121: mol_type = other RNA
  modified_base 1: mod_base = OTHER; note = 2'-O-methyl modified nucleotide with phosphorothioate linkage
  modified_base 2: mod_base = OTHER; note = 2'-O-methyl modified nucleotide with phosphorothioate linkage
  modified_base 3: mod_base = OTHER; note = 2'-O-methyl modified nucleotide with phosphorothioate linkage
  modified_base 118: mod_base = OTHER; note = Nucleotide with phosphorothioate linkage
  modified_base 119: mod_base = OTHER; note = 2'-O-methyl modified nucleotide with phosphorothioate linkage
  modified_base 120: mod_base = OTHER; note = 2'-O-methyl modified nucleotide with phosphorothioate linkage
  modified_base 121: mod_base = OTHER; note = 2'-O-methyl modified nucleotide

SEQ ID NO: 29193 - RNA, 120 nt, synthetic construct; identical to SEQ ID NO: 28631
  source 1..120: mol_type = other RNA
  modified_base 1: mod_base = OTHER; note = 2'-O-methyl modified nucleotide with phosphorothioate linkage
  modified_base 2: mod_base = OTHER; note = 2'-O-methyl modified nucleotide with phosphorothioate linkage
  modified_base 3: mod_base = OTHER; note = 2'-O-methyl modified nucleotide with phosphorothioate linkage
  modified_base 117: mod_base = OTHER; note = Nucleotide with phosphorothioate linkage
  modified_base 118: mod_base = OTHER; note = 2'-O-methyl modified nucleotide with phosphorothioate linkage
  modified_base 119: mod_base = OTHER; note = 2'-O-methyl modified nucleotide with phosphorothioate linkage
  modified_base 120: mod_base = OTHER; note = 2'-O-methyl modified nucleotide

SEQ ID NO: 29194 - RNA, 132 nt, synthetic construct; identical to SEQ ID NO: 28632
  source 1..132: mol_type = other RNA
  modified_base 1: mod_base = OTHER; note = 2'-O-methyl modified nucleotide with phosphorothioate linkage
  modified_base 2: mod_base = OTHER; note = 2'-O-methyl modified nucleotide with phosphorothioate linkage
  modified_base 3: mod_base = OTHER; note = 2'-O-methyl modified nucleotide with phosphorothioate linkage
  modified_base 129: mod_base = OTHER; note = Nucleotide with phosphorothioate linkage
  modified_base 130: mod_base = OTHER; note = 2'-O-methyl modified nucleotide with phosphorothioate linkage
  modified_base 131: mod_base = OTHER; note = 2'-O-methyl modified nucleotide with phosphorothioate linkage
  modified_base 132: mod_base = OTHER; note = 2'-O-methyl modified nucleotide

SEQ ID NO: 29195 - RNA, 131 nt, synthetic construct; identical to SEQ ID NO: 28633
  source 1..131: mol_type = other RNA
  modified_base 1: mod_base = OTHER; note = 2'-O-methyl modified nucleotide with phosphorothioate linkage
  modified_base 2: mod_base = OTHER; note = 2'-O-methyl modified nucleotide with phosphorothioate linkage
  modified_base 3: mod_base = OTHER; note = 2'-O-methyl modified nucleotide with phosphorothioate linkage
  modified_base 128: mod_base = OTHER; note = Nucleotide with phosphorothioate linkage
  modified_base 129: mod_base = OTHER; note = 2'-O-methyl modified nucleotide with phosphorothioate linkage
  modified_base 130: mod_base = OTHER; note = 2'-O-methyl modified nucleotide with phosphorothioate linkage
  modified_base 131: mod_base = OTHER; note = 2'-O-methyl modified nucleotide

SEQ ID NO: 29196 - RNA, 130 nt, synthetic construct; identical to SEQ ID NO: 28634
  source 1..130: mol_type = other RNA
  modified_base 1: mod_base = OTHER; note = 2'-O-methyl modified nucleotide with phosphorothioate linkage
  modified_base 2: mod_base = OTHER; note = 2'-O-methyl modified nucleotide with phosphorothioate linkage
  modified_base 3: mod_base = OTHER; note = 2'-O-methyl modified nucleotide with phosphorothioate linkage
  modified_base 127: mod_base = OTHER; note = Nucleotide with phosphorothioate linkage
  modified_base 128: mod_base = OTHER; note = 2'-O-methyl modified nucleotide with phosphorothioate linkage
  modified_base 129: mod_base = OTHER; note = 2'-O-methyl modified nucleotide with phosphorothioate linkage
  modified_base 130: mod_base = OTHER; note = 2'-O-methyl modified nucleotide

SEQ ID NO: 29197 - RNA, 129 nt, synthetic construct; identical to SEQ ID NO: 28635
  source 1..129: mol_type = other RNA
  modified_base 1: mod_base = OTHER; note = 2'-O-methyl modified nucleotide with phosphorothioate linkage
  modified_base 2: mod_base = OTHER; note = 2'-O-methyl modified nucleotide with phosphorothioate linkage
  modified_base 3: mod_base = OTHER; note = 2'-O-methyl modified nucleotide with phosphorothioate linkage
  modified_base 126: mod_base = OTHER; note = Nucleotide with phosphorothioate linkage
  modified_base 127: mod_base = OTHER; note = 2'-O-methyl modified nucleotide with phosphorothioate linkage
  modified_base 128: mod_base = OTHER; note = 2'-O-methyl modified nucleotide with phosphorothioate linkage
  modified_base 129: mod_base = OTHER; note = 2'-O-methyl modified nucleotide

SEQ ID NO: 29198 - RNA, 128 nt, synthetic construct; identical to SEQ ID NO: 28636
  source 1..128: mol_type = other RNA
  modified_base 1: mod_base = OTHER; note = 2'-O-methyl modified nucleotide with phosphorothioate linkage
  modified_base 2: mod_base = OTHER; note = 2'-O-methyl modified nucleotide with phosphorothioate linkage
  modified_base 3: mod_base = OTHER; note = 2'-O-methyl modified nucleotide with phosphorothioate linkage
  modified_base 125: mod_base = OTHER; note = Nucleotide with phosphorothioate linkage
  modified_base 126: mod_base = OTHER; note = 2'-O-methyl modified nucleotide with phosphorothioate linkage
  modified_base 127: mod_base = OTHER; note = 2'-O-methyl modified nucleotide with phosphorothioate linkage
  modified_base 128: mod_base = OTHER; note = 2'-O-methyl modified nucleotide

SEQ ID NO: 29199 - RNA, 127 nt, synthetic construct; identical to SEQ ID NO: 28637
  source 1..127: mol_type = other RNA
  modified_base 1: mod_base = OTHER; note = 2'-O-methyl modified nucleotide with phosphorothioate linkage
  modified_base 2: mod_base = OTHER; note = 2'-O-methyl modified nucleotide with phosphorothioate linkage
  modified_base 3: mod_base = OTHER; note = 2'-O-methyl modified nucleotide with phosphorothioate linkage
  modified_base 124: mod_base = OTHER; note = Nucleotide with phosphorothioate linkage
  modified_base 125: mod_base = OTHER; note = 2'-O-methyl modified nucleotide with phosphorothioate linkage
  modified_base 126: mod_base = OTHER; note = 2'-O-methyl modified nucleotide with phosphorothioate linkage
  modified_base 127: mod_base = OTHER; note = 2'-O-methyl modified nucleotide

SEQ ID NO: 29200 - RNA, 126 nt, synthetic construct; identical to SEQ ID NO: 28638
  source 1..126: mol_type = other RNA
  modified_base 1: mod_base = OTHER; note = 2'-O-methyl modified nucleotide with phosphorothioate linkage
  modified_base 2: mod_base = OTHER; note = 2'-O-methyl modified nucleotide with phosphorothioate linkage
  modified_base 3: mod_base = OTHER; note = 2'-O-methyl modified nucleotide with phosphorothioate linkage
  modified_base 123: mod_base = OTHER; note = Nucleotide with phosphorothioate linkage
  modified_base 124: mod_base = OTHER; note = 2'-O-methyl modified nucleotide with phosphorothioate linkage
  modified_base 125: mod_base = OTHER; note = 2'-O-methyl modified nucleotide with phosphorothioate linkage
  modified_base 126: mod_base = OTHER; note = 2'-O-methyl modified nucleotide

SEQ ID NO: 29201 - RNA, 125 nt, synthetic construct; identical to SEQ ID NO: 28639
  source 1..125: mol_type = other RNA
  modified_base 1: mod_base = OTHER; note = 2'-O-methyl modified nucleotide with phosphorothioate linkage
  modified_base 2: mod_base = OTHER; note = 2'-O-methyl modified nucleotide with phosphorothioate linkage
  modified_base 3: mod_base = OTHER; note = 2'-O-methyl modified nucleotide with phosphorothioate linkage
  modified_base 122: mod_base = OTHER; note = Nucleotide with phosphorothioate linkage
  modified_base 123: mod_base = OTHER; note = 2'-O-methyl modified nucleotide with phosphorothioate linkage
  modified_base 124: mod_base = OTHER; note = 2'-O-methyl modified nucleotide with phosphorothioate linkage
  modified_base 125: mod_base = OTHER; note = 2'-O-methyl modified nucleotide

SEQ ID NO: 29202 - RNA, 124 nt, synthetic construct; identical to SEQ ID NO: 28640
  source 1..124: mol_type = other RNA
  modified_base 1: mod_base = OTHER; note = 2'-O-methyl modified nucleotide with phosphorothioate linkage
  modified_base 2: mod_base = OTHER; note = 2'-O-methyl modified nucleotide with phosphorothioate linkage
  modified_base 3: mod_base = OTHER; note = 2'-O-methyl modified nucleotide with phosphorothioate linkage
  modified_base 121: mod_base = OTHER; note = Nucleotide with phosphorothioate linkage
  modified_base 122: mod_base = OTHER; note = 2'-O-methyl modified nucleotide with phosphorothioate linkage
  modified_base 123: mod_base = OTHER; note = 2'-O-methyl modified nucleotide with phosphorothioate linkage
  modified_base 124: mod_base = OTHER; note = 2'-O-methyl modified nucleotide

SEQ ID NO: 29203 - RNA, 123 nt, synthetic construct; identical to SEQ ID NO: 28641
  source 1..123: mol_type = other RNA
  modified_base 1: mod_base = OTHER; note = 2'-O-methyl modified nucleotide with phosphorothioate linkage
  modified_base 2: mod_base = OTHER; note = 2'-O-methyl modified nucleotide with phosphorothioate linkage
  modified_base 3: mod_base = OTHER; note = 2'-O-methyl modified nucleotide with phosphorothioate linkage
  modified_base 120: mod_base = OTHER; note = Nucleotide with phosphorothioate linkage
  modified_base 121: mod_base = OTHER; note = 2'-O-methyl modified nucleotide with phosphorothioate linkage
  modified_base 122: mod_base = OTHER; note = 2'-O-methyl modified nucleotide with phosphorothioate linkage
  modified_base 123: mod_base = OTHER; note = 2'-O-methyl modified nucleotide

SEQ ID NO: 29204 - RNA, 122 nt, synthetic construct; identical to SEQ ID NO: 28642
  source 1..122: mol_type = other RNA
  modified_base 1: mod_base = OTHER; note = 2'-O-methyl modified nucleotide with phosphorothioate linkage
  modified_base 2: mod_base = OTHER; note = 2'-O-methyl modified nucleotide with phosphorothioate linkage
  modified_base 3: mod_base = OTHER; note = 2'-O-methyl modified nucleotide with phosphorothioate linkage
  modified_base 119: mod_base = OTHER; note = Nucleotide with phosphorothioate linkage
  modified_base 120: mod_base = OTHER; note = 2'-O-methyl modified nucleotide with phosphorothioate linkage
  modified_base 121: mod_base = OTHER; note = 2'-O-methyl modified nucleotide with phosphorothioate linkage
  modified_base 122: mod_base = OTHER; note = 2'-O-methyl modified nucleotide

SEQ ID NO: 29205 - RNA, 121 nt, synthetic construct; identical to SEQ ID NO: 28643
  source 1..121: mol_type = other RNA
  modified_base 1: mod_base = OTHER; note = 2'-O-methyl modified nucleotide with phosphorothioate linkage
  modified_base 2: mod_base = OTHER; note = 2'-O-methyl modified nucleotide with phosphorothioate linkage
  modified_base 3: mod_base = OTHER; note = 2'-O-methyl modified nucleotide with phosphorothioate linkage
  modified_base 118: mod_base = OTHER; note = Nucleotide with phosphorothioate linkage
  modified_base 119: mod_base = OTHER; note = 2'-O-methyl modified nucleotide with phosphorothioate linkage
  modified_base 120: mod_base = OTHER; note = 2'-O-methyl modified nucleotide with phosphorothioate linkage
  modified_base 121: mod_base = OTHER; note = 2'-O-methyl modified nucleotide

SEQ ID NO: 29206 - RNA, 133 nt, synthetic construct; identical to SEQ ID NO: 28644
  source 1..133: mol_type = other RNA
  modified_base 1: mod_base = OTHER; note = 2'-O-methyl modified nucleotide with phosphorothioate linkage
  modified_base 2: mod_base = OTHER; note = 2'-O-methyl modified nucleotide with phosphorothioate linkage
  modified_base 3: mod_base = OTHER; note = 2'-O-methyl modified nucleotide with phosphorothioate linkage
  modified_base 130: mod_base = OTHER; note = Nucleotide with phosphorothioate linkage
  modified_base 131: mod_base = OTHER; note = 2'-O-methyl modified nucleotide with phosphorothioate linkage
  modified_base 132: mod_base = OTHER; note = 2'-O-methyl modified nucleotide with phosphorothioate linkage
  modified_base 133: mod_base = OTHER; note = 2'-O-methyl modified nucleotide

SEQ ID NO: 29207 - RNA, 132 nt, synthetic construct; identical to SEQ ID NO: 28645
  source 1..132: mol_type = other RNA
  modified_base 1: mod_base = OTHER; note = 2'-O-methyl modified nucleotide with phosphorothioate linkage
  modified_base 2: mod_base = OTHER; note = 2'-O-methyl modified nucleotide with phosphorothioate linkage
  modified_base 3: mod_base = OTHER; note = 2'-O-methyl modified nucleotide with phosphorothioate linkage
  modified_base 129: mod_base = OTHER; note = Nucleotide with phosphorothioate linkage
  modified_base 130: mod_base = OTHER; note = 2'-O-methyl modified nucleotide with phosphorothioate linkage
  modified_base 131: mod_base = OTHER; note = 2'-O-methyl modified nucleotide with phosphorothioate linkage
  modified_base 132: mod_base = OTHER; note = 2'-O-methyl modified nucleotide

SEQ ID NO: 29208 - RNA, 131 nt, synthetic construct; identical to SEQ ID NO: 28646
  source 1..131: mol_type = other RNA
  modified_base 1: mod_base = OTHER; note = 2'-O-methyl modified nucleotide with phosphorothioate linkage
  modified_base 2: mod_base = OTHER; note = 2'-O-methyl modified nucleotide with phosphorothioate linkage
  modified_base 3: mod_base = OTHER; note = 2'-O-methyl modified nucleotide with phosphorothioate linkage
  modified_base 128: mod_base = OTHER; note = Nucleotide with phosphorothioate linkage
  modified_base 129: mod_base = OTHER; note = 2'-O-methyl modified nucleotide with phosphorothioate linkage
  modified_base 130: mod_base = OTHER; note = 2'-O-methyl modified nucleotide with phosphorothioate linkage
  modified_base 131: mod_base = OTHER; note = 2'-O-methyl modified nucleotide

SEQ ID NO: 29209 - RNA, 130 nt, synthetic construct; identical to SEQ ID NO: 28647
  source 1..130: mol_type = other RNA
  modified_base 1: mod_base = OTHER; note = 2'-O-methyl modified nucleotide with phosphorothioate linkage
  modified_base 2: mod_base = OTHER; note = 2'-O-methyl modified nucleotide with phosphorothioate linkage
  modified_base 3: mod_base = OTHER; note = 2'-O-methyl modified nucleotide with phosphorothioate linkage
  modified_base 127: mod_base = OTHER; note = Nucleotide with phosphorothioate linkage
  modified_base 128: mod_base = OTHER; note = 2'-O-methyl modified nucleotide with phosphorothioate linkage
  modified_base 129: mod_base = OTHER; note = 2'-O-methyl modified nucleotide with phosphorothioate linkage
  modified_base 130: mod_base = OTHER; note = 2'-O-methyl modified nucleotide

SEQ ID NO: 29210 - RNA, 129 nt, synthetic construct; identical to SEQ ID NO: 28648
  source 1..129: mol_type = other RNA
  modified_base 1: mod_base = OTHER; note = 2'-O-methyl modified nucleotide with phosphorothioate linkage
  modified_base 2: mod_base = OTHER; note = 2'-O-methyl modified nucleotide with phosphorothioate linkage
  modified_base 3: mod_base = OTHER; note = 2'-O-methyl modified nucleotide with phosphorothioate linkage
  modified_base 126: mod_base = OTHER; note = Nucleotide with phosphorothioate linkage
  modified_base 127: mod_base = OTHER; note = 2'-O-methyl modified nucleotide with phosphorothioate linkage
  modified_base 128: mod_base = OTHER; note = 2'-O-methyl modified nucleotide with phosphorothioate linkage
  modified_base 129: mod_base = OTHER; note = 2'-O-methyl modified nucleotide

SEQ ID NO: 29211 - RNA, 128 nt, synthetic construct; identical to SEQ ID NO: 28649
  source 1..128: mol_type = other RNA
  modified_base 1: mod_base = OTHER; note = 2'-O-methyl modified nucleotide with phosphorothioate linkage
  modified_base 2: mod_base = OTHER; note = 2'-O-methyl modified nucleotide with phosphorothioate linkage
  modified_base 3: mod_base = OTHER; note = 2'-O-methyl modified nucleotide with phosphorothioate linkage
  modified_base 125: mod_base = OTHER; note = Nucleotide with phosphorothioate linkage
  modified_base 126: mod_base = OTHER; note = 2'-O-methyl modified nucleotide with phosphorothioate linkage
  modified_base 127: mod_base = OTHER; note = 2'-O-methyl modified nucleotide with phosphorothioate linkage
  modified_base 128: mod_base = OTHER; note = 2'-O-methyl modified nucleotide

SEQ ID NO: 29212 - RNA, 127 nt, synthetic construct; identical to SEQ ID NO: 28650
  source 1..127: mol_type = other RNA
  modified_base 1: mod_base = OTHER; note = 2'-O-methyl modified nucleotide with phosphorothioate linkage
  modified_base 2: mod_base = OTHER; note = 2'-O-methyl modified nucleotide with phosphorothioate linkage
  modified_base 3: mod_base = OTHER; note = 2'-O-methyl modified nucleotide with phosphorothioate linkage
  modified_base 124: mod_base = OTHER; note = Nucleotide with phosphorothioate linkage
  modified_base 125: mod_base = OTHER; note = 2'-O-methyl modified nucleotide with phosphorothioate linkage
  modified_base 126: mod_base = OTHER; note = 2'-O-methyl modified nucleotide with phosphorothioate linkage
  modified_base 127: mod_base = OTHER; note = 2'-O-methyl modified nucleotide

SEQ ID NO: 29213 - RNA, 126 nt, synthetic construct; identical to SEQ ID NO: 28651
  source 1..126: mol_type = other RNA
  modified_base 1: mod_base = OTHER; note = 2'-O-methyl modified nucleotide with phosphorothioate linkage
  modified_base 2: mod_base = OTHER; note = 2'-O-methyl modified nucleotide with phosphorothioate linkage
  modified_base 3: mod_base = OTHER; note = 2'-O-methyl modified nucleotide with phosphorothioate linkage
  modified_base 123: mod_base = OTHER; note = Nucleotide with phosphorothioate linkage
  modified_base 124: mod_base = OTHER; note = 2'-O-methyl modified nucleotide with phosphorothioate linkage
  modified_base 125: mod_base = OTHER; note = 2'-O-methyl modified nucleotide with phosphorothioate linkage
  modified_base 126: mod_base = OTHER; note = 2'-O-methyl modified nucleotide

SEQ ID NO: 29214 - RNA, 125 nt, synthetic construct; identical to SEQ ID NO: 28652
  source 1..125: mol_type = other RNA
  modified_base 1: mod_base = OTHER; note = 2'-O-methyl modified nucleotide with phosphorothioate linkage
  modified_base 2: mod_base = OTHER; note = 2'-O-methyl modified nucleotide with phosphorothioate linkage
  modified_base 3: mod_base = OTHER; note = 2'-O-methyl modified nucleotide with phosphorothioate linkage
  modified_base 122: mod_base = OTHER; note = Nucleotide with phosphorothioate linkage
  modified_base 123: mod_base = OTHER; note = 2'-O-methyl modified nucleotide with phosphorothioate linkage
  modified_base 124: mod_base = OTHER; note = 2'-O-methyl modified nucleotide with phosphorothioate linkage
  modified_base 125: mod_base = OTHER; note = 2'-O-methyl modified nucleotide

SEQ ID NO: 29215 - RNA, 124 nt, synthetic construct; identical to SEQ ID NO: 28653
  source 1..124: mol_type = other RNA
  modified_base 1: mod_base = OTHER; note = 2'-O-methyl modified nucleotide with phosphorothioate linkage
  modified_base 2: mod_base = OTHER; note = 2'-O-methyl modified nucleotide with phosphorothioate linkage
  modified_base 3: mod_base = OTHER; note = 2'-O-methyl modified nucleotide with phosphorothioate linkage
  modified_base 121: mod_base = OTHER; note = Nucleotide with phosphorothioate linkage
  modified_base 122: mod_base = OTHER; note = 2'-O-methyl modified nucleotide with phosphorothioate linkage
  modified_base 123: mod_base = OTHER; note = 2'-O-methyl modified nucleotide with phosphorothioate linkage
  modified_base 124: mod_base = OTHER; note = 2'-O-methyl modified nucleotide

SEQ ID NO: 29216 - RNA, 123 nt, synthetic construct; identical to SEQ ID NO: 28654
  source 1..123: mol_type = other RNA
  modified_base 1: mod_base = OTHER; note = 2'-O-methyl modified nucleotide with phosphorothioate linkage
  modified_base 2: mod_base = OTHER; note = 2'-O-methyl modified nucleotide with phosphorothioate linkage
  modified_base 3: mod_base = OTHER; note = 2'-O-methyl modified nucleotide with phosphorothioate linkage
  modified_base 120: mod_base = OTHER; note = Nucleotide with phosphorothioate linkage
  modified_base 121: mod_base = OTHER; note = 2'-O-methyl modified nucleotide with phosphorothioate linkage
  modified_base 122: mod_base = OTHER; note = 2'-O-methyl modified nucleotide with phosphorothioate linkage
  modified_base 123: mod_base = OTHER; note = 2'-O-methyl modified nucleotide

SEQ ID NO: 29217 - RNA, 122 nt, synthetic construct; identical to SEQ ID NO: 28655
  source 1..122: mol_type = other RNA
  modified_base 1: mod_base = OTHER; note = 2'-O-methyl modified nucleotide with phosphorothioate linkage
  modified_base 2: mod_base = OTHER; note = 2'-O-methyl modified nucleotide with phosphorothioate linkage
  modified_base 3: mod_base = OTHER; note = 2'-O-methyl modified nucleotide with phosphorothioate linkage
  modified_base 119: mod_base = OTHER; note = Nucleotide with phosphorothioate linkage
  modified_base 120: mod_base = OTHER; note = 2'-O-methyl modified nucleotide with phosphorothioate linkage
  modified_base 121: mod_base = OTHER; note = 2'-O-methyl modified nucleotide with phosphorothioate linkage
  modified_base 122: mod_base = OTHER; note = 2'-O-methyl modified nucleotide

SEQ ID NO: 29218 - RNA, 134 nt, synthetic construct; identical to SEQ ID NO: 28656
  source 1..134: mol_type = other RNA
  modified_base 1: mod_base = OTHER; note = 2'-O-methyl modified nucleotide with phosphorothioate linkage
  modified_base 2: mod_base = OTHER; note = 2'-O-methyl modified nucleotide with phosphorothioate linkage
  modified_base 3: mod_base = OTHER; note = 2'-O-methyl modified nucleotide with phosphorothioate linkage
  modified_base 131: mod_base = OTHER; note = Nucleotide with phosphorothioate linkage
  modified_base 132: mod_base = OTHER; note = 2'-O-methyl modified nucleotide with phosphorothioate linkage
  modified_base 133: mod_base = OTHER; note = 2'-O-methyl modified nucleotide with phosphorothioate linkage
  modified_base 134: mod_base = OTHER; note = 2'-O-methyl modified nucleotide

SEQ ID NO: 29219 - RNA, 133 nt, synthetic construct; identical to SEQ ID NO: 28657
  source 1..133: mol_type = other RNA
  modified_base 1: mod_base = OTHER; note = 2'-O-methyl modified nucleotide with phosphorothioate linkage
  modified_base 2: mod_base = OTHER; note = 2'-O-methyl modified nucleotide with phosphorothioate linkage
  modified_base 3: mod_base = OTHER; note = 2'-O-methyl modified nucleotide with phosphorothioate linkage
  modified_base 130: mod_base = OTHER; note = Nucleotide with phosphorothioate linkage
  modified_base 131: mod_base = OTHER; note = 2'-O-methyl modified nucleotide with phosphorothioate linkage
  modified_base 132: mod_base = OTHER; note = 2'-O-methyl modified nucleotide with phosphorothioate linkage
  modified_base 133: mod_base = OTHER; note = 2'-O-methyl modified nucleotide

SEQ ID NO: 29220 - RNA, 132 nt, synthetic construct; identical to SEQ ID NO: 28658
  source 1..132: mol_type = other RNA
  modified_base 1: mod_base = OTHER; note = 2'-O-methyl modified nucleotide with phosphorothioate linkage
  modified_base 2: mod_base = OTHER; note = 2'-O-methyl modified nucleotide with phosphorothioate linkage
  modified_base 3: mod_base = OTHER; note = 2'-O-methyl modified nucleotide with phosphorothioate linkage
  modified_base 129: mod_base = OTHER; note = Nucleotide with phosphorothioate linkage
  modified_base 130: mod_base = OTHER; note = 2'-O-methyl modified nucleotide with phosphorothioate linkage
  modified_base 131: mod_base = OTHER; note = 2'-O-methyl modified nucleotide with phosphorothioate linkage
  modified_base 132: mod_base = OTHER; note = 2'-O-methyl modified nucleotide

SEQ ID NO: 29221 - RNA, 131 nt, synthetic construct; identical to SEQ ID NO: 28659
  source 1..131: mol_type = other RNA
  modified_base 1: mod_base = OTHER; note = 2'-O-methyl modified nucleotide with phosphorothioate linkage
  modified_base 2: mod_base = OTHER; note = 2'-O-methyl modified nucleotide with phosphorothioate linkage
  modified_base 3: mod_base = OTHER; note = 2'-O-methyl modified nucleotide with phosphorothioate linkage
  modified_base 128: mod_base = OTHER; note = Nucleotide with phosphorothioate linkage
  modified_base 129: mod_base = OTHER; note = 2'-O-methyl modified nucleotide with phosphorothioate linkage
  modified_base 130: mod_base = OTHER; note = 2'-O-methyl modified nucleotide with phosphorothioate linkage
  modified_base 131: mod_base = OTHER; note = 2'-O-methyl modified nucleotide

SEQ ID NO: 29222 - RNA, 130 nt, synthetic construct; identical to SEQ ID NO: 28660
  source 1..130: mol_type = other RNA
  modified_base 1: mod_base = OTHER; note = 2'-O-methyl modified nucleotide with phosphorothioate linkage
  modified_base 2: mod_base = OTHER; note = 2'-O-methyl modified nucleotide with phosphorothioate linkage
  modified_base 3: mod_base = OTHER; note = 2'-O-methyl modified nucleotide with phosphorothioate linkage
  modified_base 127: mod_base = OTHER; note = Nucleotide with phosphorothioate linkage
  modified_base 128: mod_base = OTHER; note = 2'-O-methyl modified nucleotide with phosphorothioate linkage
  modified_base 129: mod_base = OTHER; note = 2'-O-methyl modified nucleotide with phosphorothioate linkage
  modified_base 130: mod_base = OTHER; note = 2'-O-methyl modified nucleotide

SEQ ID NO: 29223 - RNA, 129 nt, synthetic construct; identical to SEQ ID NO: 28661
  source 1..129: mol_type = other RNA
  modified_base 1: mod_base = OTHER; note = 2'-O-methyl modified nucleotide with phosphorothioate linkage
  modified_base 2: mod_base = OTHER; note = 2'-O-methyl modified nucleotide with phosphorothioate linkage
  modified_base 3: mod_base = OTHER; note = 2'-O-methyl modified nucleotide with phosphorothioate linkage
  modified_base 126: mod_base = OTHER; note = Nucleotide with phosphorothioate linkage
  modified_base 127: mod_base = OTHER; note = 2'-O-methyl modified nucleotide with phosphorothioate linkage
  modified_base 128: mod_base = OTHER; note = 2'-O-methyl modified nucleotide with phosphorothioate linkage
  modified_base 129: mod_base = OTHER; note = 2'-O-methyl modified nucleotide

SEQ ID NO: 29224 - RNA, 128 nt, synthetic construct; identical to SEQ ID NO: 28662
  source 1..128: mol_type = other RNA
  modified_base 1: mod_base = OTHER; note = 2'-O-methyl modified nucleotide with phosphorothioate linkage
  modified_base 2: mod_base = OTHER; note = 2'-O-methyl modified nucleotide with phosphorothioate linkage
  modified_base 3: mod_base = OTHER; note = 2'-O-methyl modified nucleotide with phosphorothioate linkage
  modified_base 125: mod_base = OTHER; note = Nucleotide with phosphorothioate linkage
  modified_base 126: mod_base = OTHER; note = 2'-O-methyl modified nucleotide with phosphorothioate linkage
  modified_base 127: mod_base = OTHER; note = 2'-O-methyl modified nucleotide with phosphorothioate linkage
  modified_base 128: mod_base = OTHER; note = 2'-O-methyl modified nucleotide

SEQ ID NO: 29225 - RNA, 127 nt, synthetic construct; identical to SEQ ID NO: 28663
  source 1..127: mol_type = other RNA
  modified_base 1: mod_base = OTHER; note = 2'-O-methyl modified nucleotide with phosphorothioate linkage
  modified_base 2: mod_base = OTHER; note = 2'-O-methyl modified nucleotide with phosphorothioate linkage
  modified_base 3: mod_base = OTHER; note = 2'-O-methyl modified nucleotide with phosphorothioate linkage
  modified_base 124: mod_base = OTHER; note = Nucleotide with phosphorothioate linkage
  modified_base 125: mod_base = OTHER; note = 2'-O-methyl modified nucleotide with phosphorothioate linkage
  modified_base 126: mod_base = OTHER; note = 2'-O-methyl modified nucleotide with phosphorothioate linkage
  modified_base 127: mod_base = OTHER; note = 2'-O-methyl modified nucleotide

SEQ ID NO: 29226 - RNA, 126 nt, synthetic construct; identical to SEQ ID NO: 28664
  source 1..126: mol_type = other RNA
  modified_base 1: mod_base = OTHER; note = 2'-O-methyl modified nucleotide with phosphorothioate linkage
  modified_base 2: mod_base = OTHER; note = 2'-O-methyl modified nucleotide with phosphorothioate linkage
  modified_base 3: mod_base = OTHER; note = 2'-O-methyl modified nucleotide with phosphorothioate linkage
  modified_base 123: mod_base = OTHER; note = Nucleotide with phosphorothioate linkage
  modified_base 124: mod_base = OTHER; note = 2'-O-methyl modified nucleotide with phosphorothioate linkage
  modified_base 125: mod_base = OTHER; note = 2'-O-methyl modified nucleotide with phosphorothioate linkage
  modified_base 126: mod_base = OTHER; note = 2'-O-methyl modified nucleotide

SEQ ID NO: 29227 - RNA, 125 nt, synthetic construct; identical to SEQ ID NO: 28665
  source 1..125: mol_type = other RNA
  modified_base 1: mod_base = OTHER; note = 2'-O-methyl modified nucleotide with phosphorothioate linkage
  modified_base 2: mod_base = OTHER; note = 2'-O-methyl modified nucleotide with phosphorothioate linkage
  modified_base 3: mod_base = OTHER; note = 2'-O-methyl modified nucleotide with phosphorothioate linkage
  modified_base 122: mod_base = OTHER; note = Nucleotide with phosphorothioate linkage
  modified_base 123: mod_base = OTHER; note = 2'-O-methyl modified nucleotide with phosphorothioate linkage
  modified_base 124: mod_base = OTHER; note = 2'-O-methyl modified nucleotide with phosphorothioate linkage
  modified_base 125: mod_base = OTHER; note = 2'-O-methyl modified nucleotide

SEQ ID NO: 29228 - RNA, 124 nt, synthetic construct; identical to SEQ ID NO: 28666
  source 1..124: mol_type = other RNA
  modified_base 1: mod_base = OTHER; note = 2'-O-methyl modified nucleotide with phosphorothioate linkage
  modified_base 2: mod_base = OTHER; note = 2'-O-methyl modified nucleotide with phosphorothioate linkage
  modified_base 3: mod_base = OTHER; note = 2'-O-methyl modified nucleotide with phosphorothioate linkage
  modified_base 121: mod_base = OTHER; note = Nucleotide with phosphorothioate linkage
  modified_base 122: mod_base = OTHER; note = 2'-O-methyl modified nucleotide with phosphorothioate linkage
  modified_base 123: mod_base = OTHER; note = 2'-O-methyl modified nucleotide with phosphorothioate linkage
  modified_base 124: mod_base = OTHER; note = 2'-O-methyl modified nucleotide

SEQ ID NO: 29229 - RNA, 123 nt, synthetic construct; identical to SEQ ID NO: 28667
  source 1..123: mol_type = other RNA
  modified_base 1: mod_base = OTHER; note = 2'-O-methyl modified nucleotide with phosphorothioate linkage
  modified_base 2: mod_base = OTHER; note = 2'-O-methyl modified nucleotide with phosphorothioate linkage
  modified_base 3: mod_base = OTHER; note = 2'-O-methyl modified nucleotide with phosphorothioate linkage
  modified_base 120: mod_base = OTHER; note = Nucleotide with phosphorothioate linkage
  modified_base 121: mod_base = OTHER; note = 2'-O-methyl modified nucleotide with phosphorothioate linkage
  modified_base 122: mod_base = OTHER; note = 2'-O-methyl modified nucleotide with phosphorothioate linkage
  modified_base 123: mod_base = OTHER; note = 2'-O-methyl modified nucleotide

SEQ ID NO: 29230 - RNA, 135 nt, synthetic construct; identical to SEQ ID NO: 28668
  source 1..135: mol_type = other RNA
  modified_base 1: mod_base = OTHER; note = 2'-O-methyl modified nucleotide with phosphorothioate linkage
  modified_base 2: mod_base = OTHER; note = 2'-O-methyl modified nucleotide with phosphorothioate linkage
  modified_base 3: mod_base = OTHER; note = 2'-O-methyl modified nucleotide with phosphorothioate linkage
  modified_base 132: mod_base = OTHER; note = Nucleotide with phosphorothioate linkage
  modified_base 133: mod_base = OTHER; note = 2'-O-methyl modified nucleotide with phosphorothioate linkage
  modified_base 134: mod_base = OTHER; note = 2'-O-methyl modified nucleotide with phosphorothioate linkage
  modified_base 135: mod_base = OTHER; note = 2'-O-methyl modified nucleotide

SEQ ID NO: 29231 - RNA, 134 nt, synthetic construct; identical to SEQ ID NO: 28669
  source 1..134: mol_type = other RNA
  modified_base 1: mod_base = OTHER; note = 2'-O-methyl modified nucleotide with phosphorothioate linkage
  modified_base 2: mod_base = OTHER; note = 2'-O-methyl modified nucleotide with phosphorothioate linkage
  modified_base 3: mod_base = OTHER; note = 2'-O-methyl modified nucleotide with phosphorothioate linkage
  modified_base 131: mod_base = OTHER; note = Nucleotide with phosphorothioate linkage
  modified_base 132: mod_base = OTHER; note = 2'-O-methyl modified nucleotide with phosphorothioate linkage
  modified_base 133: mod_base = OTHER; note = 2'-O-methyl modified nucleotide with phosphorothioate linkage
  modified_base 134: mod_base = OTHER; note = 2'-O-methyl modified nucleotide

SEQ ID NO: 29232 - RNA, 133 nt, synthetic construct; identical to SEQ ID NO: 28670
  source 1..133: mol_type = other RNA
  modified_base 1: mod_base = OTHER; note = 2'-O-methyl modified nucleotide with phosphorothioate linkage
  modified_base 2: mod_base = OTHER; note = 2'-O-methyl modified nucleotide with phosphorothioate linkage
  modified_base 3: mod_base = OTHER; note = 2'-O-methyl modified nucleotide with phosphorothioate linkage
  modified_base 130: mod_base = OTHER; note = Nucleotide with phosphorothioate linkage
  modified_base 131: mod_base = OTHER; note = 2'-O-methyl modified nucleotide with phosphorothioate linkage
  modified_base 132: mod_base = OTHER; note = 2'-O-methyl modified nucleotide with phosphorothioate linkage
  modified_base 133: mod_base = OTHER; note = 2'-O-methyl modified nucleotide

SEQ ID NO: 29233 - RNA, 132 nt, synthetic construct; identical to SEQ ID NO: 28671
  source 1..132: mol_type = other RNA
  modified_base 1: mod_base = OTHER; note = 2'-O-methyl modified nucleotide with phosphorothioate linkage
  modified_base 2: mod_base = OTHER; note = 2'-O-methyl modified nucleotide with phosphorothioate linkage
  modified_base 3: mod_base = OTHER; note = 2'-O-methyl modified nucleotide with phosphorothioate linkage
  modified_base 129: mod_base = OTHER; note = Nucleotide with phosphorothioate linkage
  modified_base 130: mod_base = OTHER; note = 2'-O-methyl modified nucleotide with phosphorothioate linkage
  modified_base 131: mod_base = OTHER; note = 2'-O-methyl modified nucleotide with phosphorothioate linkage
  modified_base 132: mod_base = OTHER; note = 2'-O-methyl modified nucleotide

SEQ ID NO: 29234 - RNA, 131 nt, synthetic construct; identical to SEQ ID NO: 28672
  source 1..131: mol_type = other RNA
  modified_base 1: mod_base = OTHER; note = 2'-O-methyl modified nucleotide with phosphorothioate linkage
  modified_base 2: mod_base = OTHER; note = 2'-O-methyl modified nucleotide with phosphorothioate linkage
  modified_base 3: mod_base = OTHER; note = 2'-O-methyl modified nucleotide with phosphorothioate linkage
  modified_base 128: mod_base = OTHER; note = Nucleotide with phosphorothioate linkage
  modified_base 129: mod_base = OTHER; note = 2'-O-methyl modified nucleotide with phosphorothioate linkage
  modified_base 130: mod_base = OTHER; note = 2'-O-methyl modified nucleotide with phosphorothioate linkage
  modified_base 131: mod_base = OTHER; note = 2'-O-methyl modified nucleotide

SEQ ID NO: 29235 - RNA, 130 nt, synthetic construct; identical to SEQ ID NO: 28673
  source 1..130: mol_type = other RNA
  modified_base 1: mod_base = OTHER; note = 2'-O-methyl modified nucleotide with phosphorothioate linkage
  modified_base 2: mod_base = OTHER; note = 2'-O-methyl modified nucleotide with phosphorothioate linkage
  modified_base 3: mod_base = OTHER; note = 2'-O-methyl modified nucleotide with phosphorothioate linkage
  modified_base 127: mod_base = OTHER; note = Nucleotide with phosphorothioate linkage
  modified_base 128: mod_base = OTHER; note = 2'-O-methyl modified nucleotide with phosphorothioate linkage
  modified_base 129: mod_base = OTHER; note = 2'-O-methyl modified nucleotide with phosphorothioate linkage
  modified_base 130: mod_base = OTHER; note = 2'-O-methyl modified nucleotide

SEQ ID NO: 29236 - RNA, 129 nt, synthetic construct; identical to SEQ ID NO: 28674
  source 1..129: mol_type = other RNA
  modified_base 1: mod_base = OTHER; note = 2'-O-methyl modified nucleotide with phosphorothioate linkage
  modified_base 2: mod_base = OTHER; note = 2'-O-methyl modified nucleotide with phosphorothioate linkage
  modified_base 3: mod_base = OTHER; note = 2'-O-methyl modified nucleotide with phosphorothioate linkage
  modified_base 126: mod_base = OTHER; note = Nucleotide with phosphorothioate linkage
  modified_base 127: mod_base = OTHER; note = 2'-O-methyl modified nucleotide with phosphorothioate linkage
  modified_base 128: mod_base = OTHER; note = 2'-O-methyl modified nucleotide with phosphorothioate linkage
  modified_base 129: mod_base = OTHER; note = 2'-O-methyl modified nucleotide

SEQ ID NO: 29237 - RNA, 128 nt, synthetic construct; identical to SEQ ID NO: 28675
  source 1..128: mol_type = other RNA
  modified_base 1: mod_base = OTHER; note = 2'-O-methyl modified nucleotide with phosphorothioate linkage
  modified_base 2: mod_base = OTHER; note = 2'-O-methyl modified nucleotide with phosphorothioate linkage
  modified_base 3: mod_base = OTHER; note = 2'-O-methyl modified nucleotide with phosphorothioate linkage
  modified_base 125: mod_base = OTHER; note = Nucleotide with phosphorothioate linkage
  modified_base 126: mod_base = OTHER; note = 2'-O-methyl modified nucleotide with phosphorothioate linkage
  modified_base 127: mod_base = OTHER; note = 2'-O-methyl modified nucleotide with phosphorothioate linkage
  modified_base 128: mod_base = OTHER; note = 2'-O-methyl modified nucleotide

SEQ ID NO: 29238 - RNA, 127 nt, synthetic construct; identical to SEQ ID NO: 28676
  source 1..127: mol_type = other RNA
  modified_base 1: mod_base = OTHER; note = 2'-O-methyl modified nucleotide with phosphorothioate linkage
  modified_base 2: mod_base = OTHER; note = 2'-O-methyl modified nucleotide with phosphorothioate linkage
  modified_base 3: mod_base = OTHER; note = 2'-O-methyl modified nucleotide with phosphorothioate linkage
  modified_base 124: mod_base = OTHER; note = Nucleotide with phosphorothioate linkage
  modified_base 125: mod_base = OTHER; note = 2'-O-methyl modified nucleotide with phosphorothioate linkage
  modified_base 126: mod_base = OTHER; note = 2'-O-methyl modified nucleotide with phosphorothioate linkage
  modified_base 127: mod_base = OTHER; note = 2'-O-methyl modified nucleotide

SEQ ID NO: 29239 - RNA, 126 nt, synthetic construct; identical to SEQ ID NO: 28677
  source 1..126: mol_type = other RNA
  modified_base 1: mod_base = OTHER; note = 2'-O-methyl modified nucleotide with phosphorothioate linkage
  modified_base 2: mod_base = OTHER; note = 2'-O-methyl modified nucleotide with phosphorothioate linkage
  modified_base 3: mod_base = OTHER; note = 2'-O-methyl modified nucleotide with phosphorothioate linkage
  modified_base 123: mod_base = OTHER; note = Nucleotide with phosphorothioate linkage
  modified_base 124: mod_base = OTHER; note = 2'-O-methyl modified nucleotide with phosphorothioate linkage
  modified_base 125: mod_base = OTHER; note = 2'-O-methyl modified nucleotide with phosphorothioate linkage
  modified_base 126: mod_base = OTHER; note = 2'-O-methyl modified nucleotide

SEQ ID NO: 29240 - RNA, 125 nt, synthetic construct; identical to SEQ ID NO: 28678
  source 1..125: mol_type = other RNA
  modified_base 1: mod_base = OTHER; note = 2'-O-methyl modified nucleotide with phosphorothioate linkage
  modified_base 2: mod_base = OTHER; note = 2'-O-methyl modified nucleotide with phosphorothioate linkage
  modified_base 3: mod_base = OTHER; note = 2'-O-methyl modified nucleotide with phosphorothioate linkage
  modified_base 122: mod_base = OTHER; note = Nucleotide with phosphorothioate linkage
  modified_base 123: mod_base = OTHER; note = 2'-O-methyl modified nucleotide with phosphorothioate linkage
  modified_base 124: mod_base = OTHER; note = 2'-O-methyl modified nucleotide with phosphorothioate linkage
  modified_base 125: mod_base = OTHER; note = 2'-O-methyl modified nucleotide

SEQ ID NO: 29241 - RNA, 124 nt, synthetic construct; identical to SEQ ID NO: 28679
  source 1..124: mol_type = other RNA
  modified_base 1: mod_base = OTHER; note = 2'-O-methyl modified nucleotide with phosphorothioate linkage
  modified_base 2: mod_base = OTHER; note = 2'-O-methyl modified nucleotide with phosphorothioate linkage
  modified_base 3: mod_base = OTHER; note = 2'-O-methyl modified nucleotide with phosphorothioate linkage
  modified_base 121: mod_base = OTHER; note = Nucleotide with phosphorothioate linkage
  modified_base 122: mod_base = OTHER; note = 2'-O-methyl modified nucleotide with phosphorothioate linkage
  modified_base 123: mod_base = OTHER; note = 2'-O-methyl modified nucleotide with phosphorothioate linkage
  modified_base 124: mod_base = OTHER; note = 2'-O-methyl modified nucleotide

SEQ ID NO: 29242 - RNA, 136 nt, synthetic construct; identical to SEQ ID NO: 28680
  source 1..136: mol_type = other RNA
  modified_base 1: mod_base = OTHER; note = 2'-O-methyl modified nucleotide with phosphorothioate linkage
  modified_base 2: mod_base = OTHER; note = 2'-O-methyl modified nucleotide with phosphorothioate linkage
  modified_base 3: mod_base = OTHER; note = 2'-O-methyl modified nucleotide with phosphorothioate linkage
  modified_base 133: mod_base = OTHER; note = Nucleotide with phosphorothioate linkage
  modified_base 134: mod_base = OTHER; note = 2'-O-methyl modified nucleotide with phosphorothioate linkage
  modified_base 135: mod_base = OTHER; note = 2'-O-methyl modified nucleotide with phosphorothioate linkage
  modified_base 136: mod_base = OTHER; note = 2'-O-methyl modified nucleotide

SEQ ID NO: 29243 - RNA, 135 nt, synthetic construct; identical to SEQ ID NO: 28681
  source 1..135: mol_type = other RNA
  modified_base 1: mod_base = OTHER; note = 2'-O-methyl modified nucleotide with phosphorothioate linkage
  modified_base 2: mod_base = OTHER; note = 2'-O-methyl modified nucleotide with phosphorothioate linkage
  modified_base 3: mod_base = OTHER; note = 2'-O-methyl modified nucleotide with phosphorothioate linkage
  modified_base 132: mod_base = OTHER; note = Nucleotide with phosphorothioate linkage
  modified_base 133: mod_base = OTHER; note = 2'-O-methyl modified nucleotide with phosphorothioate linkage
  modified_base 134: mod_base = OTHER; note = 2'-O-methyl modified nucleotide with phosphorothioate linkage
  modified_base 135: mod_base = OTHER; note = 2'-O-methyl modified nucleotide

SEQ ID NO: 29244 - RNA, 134 nt, synthetic construct; identical to SEQ ID NO: 28682
  source 1..134: mol_type = other RNA
  modified_base 1: mod_base = OTHER; note = 2'-O-methyl modified nucleotide with phosphorothioate linkage
  modified_base 2: mod_base = OTHER; note = 2'-O-methyl modified nucleotide with phosphorothioate linkage
  modified_base 3: mod_base = OTHER; note = 2'-O-methyl modified nucleotide with phosphorothioate linkage
  modified_base 131: mod_base = OTHER; note = Nucleotide with phosphorothioate linkage
  modified_base 132: mod_base = OTHER; note = 2'-O-methyl modified nucleotide with phosphorothioate linkage
  modified_base 133: mod_base = OTHER; note = 2'-O-methyl modified nucleotide with phosphorothioate linkage
  modified_base 134: mod_base = OTHER; note = 2'-O-methyl modified nucleotide

SEQ ID NO: 29245 - RNA, 133 nt, synthetic construct; identical to SEQ ID NO: 28683
  source 1..133: mol_type = other RNA
  modified_base 1: mod_base = OTHER; note = 2'-O-methyl modified nucleotide with phosphorothioate linkage
  modified_base 2: mod_base = OTHER; note = 2'-O-methyl modified nucleotide with phosphorothioate linkage
  modified_base 3: mod_base = OTHER; note = 2'-O-methyl modified nucleotide with phosphorothioate linkage
  modified_base 130: mod_base = OTHER; note = Nucleotide with phosphorothioate linkage
  modified_base 131: mod_base = OTHER; note = 2'-O-methyl modified nucleotide with phosphorothioate linkage
  modified_base 132: mod_base = OTHER; note = 2'-O-methyl modified nucleotide with phosphorothioate linkage
  modified_base 133: mod_base = OTHER; note = 2'-O-methyl modified nucleotide

SEQ ID NO: 29246 - RNA, 132 nt, synthetic construct; identical to SEQ ID NO: 28684
  source 1..132: mol_type = other RNA
  modified_base 1: mod_base = OTHER; note = 2'-O-methyl modified nucleotide with phosphorothioate linkage
  modified_base 2: mod_base = OTHER; note = 2'-O-methyl modified nucleotide with phosphorothioate linkage
  modified_base 3: mod_base = OTHER; note = 2'-O-methyl modified nucleotide with phosphorothioate linkage
  modified_base 129: mod_base = OTHER; note = Nucleotide with phosphorothioate linkage
  modified_base 130: mod_base = OTHER; note = 2'-O-methyl modified nucleotide with phosphorothioate linkage
  modified_base 131: mod_base = OTHER; note = 2'-O-methyl modified nucleotide with phosphorothioate linkage
  modified_base 132: mod_base = OTHER; note = 2'-O-methyl modified nucleotide

SEQ ID NO: 29247 - RNA, 131 nt, synthetic construct; identical to SEQ ID NO: 28685
  source 1..131: mol_type = other RNA
  modified_base 1: mod_base = OTHER; note = 2'-O-methyl modified nucleotide with phosphorothioate linkage
  modified_base 2: mod_base = OTHER; note = 2'-O-methyl modified nucleotide with phosphorothioate linkage
  modified_base 3: mod_base = OTHER; note = 2'-O-methyl modified nucleotide with phosphorothioate linkage
  modified_base 128: mod_base = OTHER; note = Nucleotide with phosphorothioate linkage
  modified_base 129: mod_base = OTHER; note = 2'-O-methyl modified nucleotide with phosphorothioate linkage
  modified_base 130: mod_base = OTHER; note = 2'-O-methyl modified nucleotide with phosphorothioate linkage
  modified_base 131: mod_base = OTHER; note = 2'-O-methyl modified nucleotide

SEQ ID NO: 29248 - RNA, 130 nt, synthetic construct; identical to SEQ ID NO: 28686
  source 1..130: mol_type = other RNA
  modified_base 1: mod_base = OTHER; note = 2'-O-methyl modified nucleotide with phosphorothioate linkage
  modified_base 2: mod_base = OTHER; note = 2'-O-methyl modified nucleotide with phosphorothioate linkage
  modified_base 3: mod_base = OTHER; note = 2'-O-methyl modified nucleotide with phosphorothioate linkage
  modified_base 127: mod_base = OTHER; note = Nucleotide with phosphorothioate linkage
  modified_base 128: mod_base = OTHER; note = 2'-O-methyl modified nucleotide with phosphorothioate linkage
  modified_base 129: mod_base = OTHER; note = 2'-O-methyl modified nucleotide with phosphorothioate linkage
  modified_base 130: mod_base = OTHER; note = 2'-O-methyl modified nucleotide

SEQ ID NO: 29249 - RNA, 129 nt, synthetic construct; identical to SEQ ID NO: 28687
  source 1..129: mol_type = other RNA
  modified_base 1: mod_base = OTHER; note = 2'-O-methyl modified nucleotide with phosphorothioate linkage
  modified_base 2: mod_base = OTHER; note = 2'-O-methyl modified nucleotide with phosphorothioate linkage
  modified_base 3: mod_base = OTHER; note = 2'-O-methyl modified nucleotide with phosphorothioate linkage
  modified_base 126: mod_base = OTHER; note = Nucleotide with phosphorothioate linkage
  modified_base 127: mod_base = OTHER; note = 2'-O-methyl modified nucleotide with phosphorothioate linkage
  modified_base 128: mod_base = OTHER; note = 2'-O-methyl modified nucleotide with phosphorothioate linkage
  modified_base 129: mod_base = OTHER; note = 2'-O-methyl modified nucleotide

SEQ ID NO: 29250 - RNA, 128 nt, synthetic construct; identical to SEQ ID NO: 28688
  source 1..128: mol_type = other RNA
  modified_base 1: mod_base = OTHER; note = 2'-O-methyl modified nucleotide with phosphorothioate linkage
  modified_base 2: mod_base = OTHER; note = 2'-O-methyl modified nucleotide with phosphorothioate linkage
  modified_base 3: mod_base = OTHER; note = 2'-O-methyl modified nucleotide with phosphorothioate linkage
  modified_base 125: mod_base = OTHER; note = Nucleotide with phosphorothioate linkage
  modified_base 126: mod_base = OTHER; note = 2'-O-methyl modified nucleotide with phosphorothioate linkage
  modified_base 127: mod_base = OTHER; note = 2'-O-methyl modified nucleotide with phosphorothioate linkage
  modified_base 128: mod_base = OTHER; note = 2'-O-methyl modified nucleotide

SEQ ID NO: 29251 - RNA, 127 nt, synthetic construct; identical to SEQ ID NO: 28689
  source 1..127: mol_type = other RNA
  modified_base 1: mod_base = OTHER; note = 2'-O-methyl modified nucleotide with phosphorothioate linkage
  modified_base 2: mod_base = OTHER; note = 2'-O-methyl modified nucleotide with phosphorothioate linkage
  modified_base 3: mod_base = OTHER; note = 2'-O-methyl modified nucleotide with phosphorothioate linkage
  modified_base 124: mod_base = OTHER; note = Nucleotide with phosphorothioate linkage
  modified_base 125: mod_base = OTHER; note = 2'-O-methyl modified nucleotide with phosphorothioate linkage
  modified_base 126: mod_base = OTHER; note = 2'-O-methyl modified nucleotide with phosphorothioate linkage
  modified_base 127: mod_base = OTHER; note = 2'-O-methyl modified nucleotide

SEQ ID NO: 29252 - RNA, 126 nt, synthetic construct; identical to SEQ ID NO: 28690
  source 1..126: mol_type = other RNA
  modified_base 1: mod_base = OTHER; note = 2'-O-methyl modified nucleotide with phosphorothioate linkage
  modified_base 2: mod_base = OTHER; note = 2'-O-methyl modified nucleotide with phosphorothioate linkage
  modified_base 3: mod_base = OTHER; note = 2'-O-methyl modified nucleotide with phosphorothioate linkage
  modified_base 123: mod_base = OTHER; note = Nucleotide with phosphorothioate linkage
  modified_base 124: mod_base = OTHER; note = 2'-O-methyl modified nucleotide with phosphorothioate linkage
  modified_base 125: mod_base = OTHER; note = 2'-O-methyl modified nucleotide with phosphorothioate linkage
  modified_base 126: mod_base = OTHER; note = 2'-O-methyl modified nucleotide

SEQ ID NO: 29253 - RNA, 125 nt, synthetic construct; identical to SEQ ID NO: 28691
  source 1..125: mol_type = other RNA
  modified_base 1: mod_base = OTHER; note = 2'-O-methyl modified nucleotide with phosphorothioate linkage
  modified_base 2: mod_base = OTHER; note = 2'-O-methyl modified nucleotide with phosphorothioate linkage
  modified_base 3: mod_base = OTHER; note = 2'-O-methyl modified nucleotide with phosphorothioate linkage
  modified_base 122: mod_base = OTHER; note = Nucleotide with phosphorothioate linkage
  modified_base 123: mod_base = OTHER; note = 2'-O-methyl modified nucleotide with phosphorothioate linkage
  modified_base 124: mod_base = OTHER; note = 2'-O-methyl modified nucleotide with phosphorothioate linkage
  modified_base 125: mod_base = OTHER; note = 2'-O-methyl modified nucleotide

SEQ ID NO: 29254 - RNA, 137 nt, synthetic construct; identical to SEQ ID NO: 28692
  source 1..137: mol_type = other RNA
  modified_base 1: mod_base = OTHER; note = 2'-O-methyl modified nucleotide with phosphorothioate linkage
  modified_base 2: mod_base = OTHER; note = 2'-O-methyl modified nucleotide with phosphorothioate linkage
  modified_base 3: mod_base = OTHER; note = 2'-O-methyl modified nucleotide with phosphorothioate linkage
  modified_base 134: mod_base = OTHER; note = Nucleotide with phosphorothioate linkage
  modified_base 135: mod_base = OTHER; note = 2'-O-methyl modified nucleotide with phosphorothioate linkage
  modified_base 136: mod_base = OTHER; note = 2'-O-methyl modified nucleotide with phosphorothioate linkage
  modified_base 137: mod_base = OTHER; note = 2'-O-methyl modified nucleotide

SEQ ID NO: 29255 - RNA, 136 nt, synthetic construct; identical to SEQ ID NO: 28693
  source 1..136: mol_type = other RNA
  modified_base 1: mod_base = OTHER; note = 2'-O-methyl modified nucleotide with phosphorothioate linkage
  modified_base 2: mod_base = OTHER; note = 2'-O-methyl modified nucleotide with phosphorothioate linkage
  modified_base 3: mod_base = OTHER; note = 2'-O-methyl modified nucleotide with phosphorothioate linkage
  modified_base 133: mod_base = OTHER; note = Nucleotide with phosphorothioate linkage
  modified_base 134: mod_base = OTHER; note = 2'-O-methyl modified nucleotide with phosphorothioate linkage
  modified_base 135: mod_base = OTHER; note = 2'-O-methyl modified nucleotide with phosphorothioate linkage
  modified_base 136: mod_base = OTHER; note = 2'-O-methyl modified nucleotide

SEQ ID NO: 29256 - RNA, 135 nt, synthetic construct; identical to SEQ ID NO: 28694
  source 1..135: mol_type = other RNA
  modified_base 1: mod_base = OTHER; note = 2'-O-methyl modified nucleotide with phosphorothioate linkage
  modified_base 2: mod_base = OTHER; note = 2'-O-methyl modified nucleotide with phosphorothioate linkage
  modified_base 3: mod_base = OTHER; note = 2'-O-methyl modified nucleotide with phosphorothioate linkage
  modified_base 132: mod_base = OTHER; note = Nucleotide with phosphorothioate linkage
  modified_base 133: mod_base = OTHER; note = 2'-O-methyl modified nucleotide with phosphorothioate linkage
  modified_base 134: mod_base = OTHER; note = 2'-O-methyl modified nucleotide with phosphorothioate linkage
  modified_base 135: mod_base = OTHER; note = 2'-O-methyl modified nucleotide

SEQ ID NO: 29257 - RNA, 134 nt, synthetic construct; identical to SEQ ID NO: 28695
  source 1..134: mol_type = other RNA
  modified_base 1: mod_base = OTHER; note = 2'-O-methyl modified nucleotide with phosphorothioate linkage
  modified_base 2: mod_base = OTHER; note = 2'-O-methyl modified nucleotide with phosphorothioate linkage
  modified_base 3: mod_base = OTHER; note = 2'-O-methyl modified nucleotide with phosphorothioate linkage
  modified_base 131: mod_base = OTHER; note = Nucleotide with phosphorothioate linkage
  modified_base 132: mod_base = OTHER; note = 2'-O-methyl modified nucleotide with phosphorothioate linkage
  modified_base 133: mod_base = OTHER; note = 2'-O-methyl modified nucleotide with phosphorothioate linkage
  modified_base 134: mod_base = OTHER; note = 2'-O-methyl modified nucleotide

SEQ ID NO: 29258 - RNA, 133 nt, synthetic construct; identical to SEQ ID NO: 28696
  source 1..133: mol_type = other RNA
  modified_base 1: mod_base = OTHER; note = 2'-O-methyl modified nucleotide with phosphorothioate linkage
  modified_base 2: mod_base = OTHER; note = 2'-O-methyl modified nucleotide with phosphorothioate linkage
  modified_base 3: mod_base = OTHER; note = 2'-O-methyl modified nucleotide with phosphorothioate linkage
  modified_base 130: mod_base = OTHER; note = Nucleotide with phosphorothioate linkage
  modified_base 131: mod_base = OTHER; note = 2'-O-methyl modified nucleotide with phosphorothioate linkage
  modified_base 132: mod_base = OTHER; note = 2'-O-methyl modified nucleotide with phosphorothioate linkage
  modified_base 133: mod_base = OTHER; note = 2'-O-methyl modified nucleotide

SEQ ID NO: 29259 - RNA, 132 nt, synthetic construct; identical to SEQ ID NO: 28697
  source 1..132: mol_type = other RNA
  modified_base 1: mod_base = OTHER; note = 2'-O-methyl modified nucleotide with phosphorothioate linkage
  modified_base 2: mod_base = OTHER; note = 2'-O-methyl modified nucleotide with phosphorothioate linkage
  modified_base 3: mod_base = OTHER; note = 2'-O-methyl modified nucleotide with phosphorothioate linkage
  modified_base 129: mod_base = OTHER; note = Nucleotide with phosphorothioate linkage
  modified_base 130: mod_base = OTHER; note = 2'-O-methyl modified nucleotide with phosphorothioate linkage
  modified_base 131: mod_base = OTHER; note = 2'-O-methyl modified nucleotide with phosphorothioate linkage
  modified_base 132: mod_base = OTHER; note = 2'-O-methyl modified nucleotide

SEQ ID NO: 29260 - RNA, 131 nt, synthetic construct; identical to SEQ ID NO: 28698
  source 1..131: mol_type = other RNA
  modified_base 1: mod_base = OTHER; note = 2'-O-methyl modified nucleotide with phosphorothioate linkage
  modified_base 2: mod_base = OTHER; note = 2'-O-methyl modified nucleotide with phosphorothioate linkage
  modified_base 3: mod_base = OTHER; note = 2'-O-methyl modified nucleotide with phosphorothioate linkage
  modified_base 128: mod_base = OTHER; note = Nucleotide with phosphorothioate linkage
  modified_base 129: mod_base = OTHER; note = 2'-O-methyl modified nucleotide with phosphorothioate linkage
  modified_base 130: mod_base = OTHER; note = 2'-O-methyl modified nucleotide with phosphorothioate linkage
  modified_base 131: mod_base = OTHER; note = 2'-O-methyl modified nucleotide

SEQ ID NO: 29261 - RNA, 130 nt, synthetic construct; identical to SEQ ID NO: 28699
  source 1..130: mol_type = other RNA
  modified_base 1: mod_base = OTHER; note = 2'-O-methyl modified nucleotide with phosphorothioate linkage
  modified_base 2: mod_base = OTHER; note = 2'-O-methyl modified nucleotide with phosphorothioate linkage
  modified_base 3: mod_base = OTHER; note = 2'-O-methyl modified nucleotide with phosphorothioate linkage
  modified_base 127: mod_base = OTHER; note = Nucleotide with phosphorothioate linkage
  modified_base 128: mod_base = OTHER; note = 2'-O-methyl modified nucleotide with phosphorothioate linkage
  modified_base 129: mod_base = OTHER; note = 2'-O-methyl modified nucleotide with phosphorothioate linkage
  modified_base 130: mod_base = OTHER; note = 2'-O-methyl modified nucleotide

SEQ ID NO: 29262 - RNA, 129 nt, synthetic construct; identical to SEQ ID NO: 28700
  source 1..129: mol_type = other RNA
  modified_base 1: mod_base = OTHER; note = 2'-O-methyl modified nucleotide with phosphorothioate linkage
  modified_base 2: mod_base = OTHER; note = 2'-O-methyl modified nucleotide with phosphorothioate linkage
  modified_base 3: mod_base = OTHER; note = 2'-O-methyl modified nucleotide with phosphorothioate linkage
  modified_base 126: mod_base = OTHER; note = Nucleotide with phosphorothioate linkage
  modified_base 127: mod_base = OTHER; note = 2'-O-methyl modified nucleotide with phosphorothioate linkage
  modified_base 128: mod_base = OTHER; note = 2'-O-methyl modified nucleotide with phosphorothioate linkage
  modified_base 129: mod_base = OTHER; note = 2'-O-methyl modified nucleotide

SEQ ID NO: 29263 - RNA, 128 nt, synthetic construct; identical to SEQ ID NO: 28701
  source 1..128: mol_type = other RNA
  modified_base 1: mod_base = OTHER; note = 2'-O-methyl modified nucleotide with phosphorothioate linkage
  modified_base 2: mod_base = OTHER; note = 2'-O-methyl modified nucleotide with phosphorothioate linkage
  modified_base 3: mod_base = OTHER; note = 2'-O-methyl modified nucleotide with phosphorothioate linkage
  modified_base 125: mod_base = OTHER; note = Nucleotide with phosphorothioate linkage
  modified_base 126: mod_base = OTHER; note = 2'-O-methyl modified nucleotide with phosphorothioate linkage
  modified_base 127: mod_base = OTHER; note = 2'-O-methyl modified nucleotide with phosphorothioate linkage
  modified_base 128: mod_base = OTHER; note = 2'-O-methyl modified nucleotide

SEQ ID NO: 29264 - RNA, 127 nt, synthetic construct; identical to SEQ ID NO: 28702
  source 1..127: mol_type = other RNA
  modified_base 1: mod_base = OTHER; note = 2'-O-methyl modified nucleotide with phosphorothioate linkage
  modified_base 2: mod_base = OTHER; note = 2'-O-methyl modified nucleotide with phosphorothioate linkage
  modified_base 3: mod_base = OTHER; note = 2'-O-methyl modified nucleotide with phosphorothioate linkage
  modified_base 124: mod_base = OTHER; note = Nucleotide with phosphorothioate linkage
  modified_base 125: mod_base = OTHER; note = 2'-O-methyl modified nucleotide with phosphorothioate linkage
  modified_base 126: mod_base = OTHER; note = 2'-O-methyl modified nucleotide with phosphorothioate linkage
  modified_base 127: mod_base = OTHER; note = 2'-O-methyl modified nucleotide

SEQ ID NO: 29265 - RNA, 126 nt, synthetic construct; identical to SEQ ID NO: 28703
  source 1..126: mol_type = other RNA
  modified_base 1: mod_base = OTHER; note = 2'-O-methyl modified nucleotide with phosphorothioate linkage
  modified_base 2: mod_base = OTHER; note = 2'-O-methyl modified nucleotide with phosphorothioate linkage
  modified_base 3: mod_base = OTHER; note = 2'-O-methyl modified nucleotide with phosphorothioate linkage
  modified_base 123: mod_base = OTHER; note = Nucleotide with phosphorothioate linkage
  modified_base 124: mod_base = OTHER; note = 2'-O-methyl modified nucleotide with phosphorothioate linkage
  modified_base 125: mod_base = OTHER; note = 2'-O-methyl modified nucleotide with phosphorothioate linkage
  modified_base 126: mod_base = OTHER; note = 2'-O-methyl modified nucleotide

SEQ ID NO: 29266 - RNA, 138 nt, synthetic construct; identical to SEQ ID NO: 28704
  source 1..138: mol_type = other RNA
  modified_base 1: mod_base = OTHER; note = 2'-O-methyl modified nucleotide with phosphorothioate linkage
  modified_base 2: mod_base = OTHER; note = 2'-O-methyl modified nucleotide with phosphorothioate linkage
  modified_base 3: mod_base = OTHER; note = 2'-O-methyl modified nucleotide with phosphorothioate linkage
  modified_base 135: mod_base = OTHER; note = Nucleotide with phosphorothioate linkage
  modified_base 136: mod_base = OTHER; note = 2'-O-methyl modified nucleotide with phosphorothioate linkage
  modified_base 137: mod_base = OTHER; note = 2'-O-methyl modified nucleotide with phosphorothioate linkage
  modified_base 138: mod_base = OTHER; note = 2'-O-methyl modified nucleotide

SEQ ID NO: 29267 - RNA, 137 nt, synthetic construct; identical to SEQ ID NO: 28705
  source 1..137: mol_type = other RNA
  modified_base 1: mod_base = OTHER; note = 2'-O-methyl modified nucleotide with phosphorothioate linkage
  modified_base 2: mod_base = OTHER; note = 2'-O-methyl modified nucleotide with phosphorothioate linkage
  modified_base 3: mod_base = OTHER; note = 2'-O-methyl modified nucleotide with phosphorothioate linkage
  modified_base 134: mod_base = OTHER; note = Nucleotide with phosphorothioate linkage
  modified_base 135: mod_base = OTHER; note = 2'-O-methyl modified nucleotide with phosphorothioate linkage
  modified_base 136: mod_base = OTHER; note = 2'-O-methyl modified nucleotide with phosphorothioate linkage
  modified_base 137: mod_base = OTHER; note = 2'-O-methyl modified nucleotide

SEQ ID NO: 29268 - RNA, 136 nt, synthetic construct; identical to SEQ ID NO: 28706
  source 1..136: mol_type = other RNA
  modified_base 1: mod_base = OTHER; note = 2'-O-methyl modified nucleotide with phosphorothioate linkage
  modified_base 2: mod_base = OTHER; note = 2'-O-methyl modified nucleotide with phosphorothioate linkage
  modified_base 3: mod_base = OTHER; note = 2'-O-methyl modified nucleotide with phosphorothioate linkage
  modified_base 133: mod_base = OTHER; note = Nucleotide with phosphorothioate linkage
  modified_base 134: mod_base = OTHER; note = 2'-O-methyl modified nucleotide with phosphorothioate linkage
  modified_base 135: mod_base = OTHER; note = 2'-O-methyl modified nucleotide with phosphorothioate linkage
  modified_base 136: mod_base = OTHER; note = 2'-O-methyl modified nucleotide

SEQ ID NO: 29269 - RNA, 135 nt, synthetic construct; identical to SEQ ID NO: 28707
  source 1..135: mol_type = other RNA
  modified_base 1: mod_base = OTHER; note = 2'-O-methyl modified nucleotide with phosphorothioate linkage
  modified_base 2: mod_base = OTHER; note = 2'-O-methyl modified nucleotide with phosphorothioate linkage
  modified_base 3: mod_base = OTHER; note = 2'-O-methyl modified nucleotide with phosphorothioate linkage
  modified_base 132: mod_base = OTHER; note = Nucleotide with phosphorothioate linkage
  modified_base 133: mod_base = OTHER; note = 2'-O-methyl modified nucleotide with phosphorothioate linkage
  modified_base 134: mod_base = OTHER; note = 2'-O-methyl modified nucleotide with phosphorothioate linkage
  modified_base 135: mod_base = OTHER; note = 2'-O-methyl modified nucleotide

SEQ ID NO: 29270 - RNA, 134 nt, synthetic construct; identical to SEQ ID NO: 28708
  source 1..134: mol_type = other RNA
  modified_base 1: mod_base = OTHER; note = 2'-O-methyl modified nucleotide with phosphorothioate linkage
  modified_base 2: mod_base = OTHER; note = 2'-O-methyl modified nucleotide with phosphorothioate linkage
  modified_base 3: mod_base = OTHER; note = 2'-O-methyl modified nucleotide with phosphorothioate linkage
  modified_base 131: mod_base = OTHER; note = Nucleotide with phosphorothioate linkage
  modified_base 132: mod_base = OTHER; note = 2'-O-methyl modified nucleotide with phosphorothioate linkage
  modified_base 133: mod_base = OTHER; note = 2'-O-methyl modified nucleotide with phosphorothioate linkage
  modified_base 134: mod_base = OTHER; note = 2'-O-methyl modified nucleotide

SEQ ID NO: 29271 - RNA, 133 nt, synthetic construct; identical to SEQ ID NO: 28709
  source 1..133: mol_type = other RNA
  modified_base 1: mod_base = OTHER; note = 2'-O-methyl modified nucleotide with phosphorothioate linkage
  modified_base 2: mod_base = OTHER; note = 2'-O-methyl modified nucleotide with phosphorothioate linkage
  modified_base 3: mod_base = OTHER; note = 2'-O-methyl modified nucleotide with phosphorothioate linkage
  modified_base 130: mod_base = OTHER; note = Nucleotide with phosphorothioate linkage
  modified_base 131: mod_base = OTHER; note = 2'-O-methyl modified nucleotide with phosphorothioate linkage
  modified_base 132: mod_base = OTHER; note = 2'-O-methyl modified nucleotide with phosphorothioate linkage
  modified_base 133: mod_base = OTHER; note = 2'-O-methyl modified nucleotide

SEQ ID NO: 29272 - RNA, 132 nt, synthetic construct; identical to SEQ ID NO: 28710
  source 1..132: mol_type = other RNA
  modified_base 1: mod_base = OTHER; note = 2'-O-methyl modified nucleotide with phosphorothioate linkage
  modified_base 2: mod_base = OTHER; note = 2'-O-methyl modified nucleotide with phosphorothioate linkage
  modified_base 3: mod_base = OTHER; note = 2'-O-methyl modified nucleotide with phosphorothioate linkage
  modified_base 129: mod_base = OTHER; note = Nucleotide with phosphorothioate linkage
  modified_base 130: mod_base = OTHER; note = 2'-O-methyl modified nucleotide with phosphorothioate linkage
  modified_base 131: mod_base = OTHER; note = 2'-O-methyl modified nucleotide with phosphorothioate linkage
  modified_base 132: mod_base = OTHER; note = 2'-O-methyl modified nucleotide

SEQ ID NO: 29273 - RNA, 131 nt, synthetic construct; identical to SEQ ID NO: 28711
  source 1..131: mol_type = other RNA
  modified_base 1: mod_base = OTHER; note = 2'-O-methyl modified nucleotide with phosphorothioate linkage
  modified_base 2: mod_base = OTHER; note = 2'-O-methyl modified nucleotide with phosphorothioate linkage
  modified_base 3: mod_base = OTHER; note = 2'-O-methyl modified nucleotide with phosphorothioate linkage
  modified_base 128: mod_base = OTHER; note = Nucleotide with phosphorothioate linkage
  modified_base 129: mod_base = OTHER; note = 2'-O-methyl modified nucleotide with phosphorothioate linkage
  modified_base 130: mod_base = OTHER; note = 2'-O-methyl modified nucleotide with phosphorothioate linkage
  modified_base 131: mod_base = OTHER; note = 2'-O-methyl modified nucleotide

SEQ ID NO: 29274 - RNA, 130 nt, synthetic construct; identical to SEQ ID NO: 28712
  source 1..130: mol_type = other RNA
  modified_base 1: mod_base = OTHER; note = 2'-O-methyl modified nucleotide with phosphorothioate linkage
  modified_base 2: mod_base = OTHER; note = 2'-O-methyl modified nucleotide with phosphorothioate linkage
  modified_base 3: mod_base = OTHER; note = 2'-O-methyl modified nucleotide with phosphorothioate linkage
  modified_base 127: mod_base = OTHER; note = Nucleotide with phosphorothioate linkage
  modified_base 128: mod_base = OTHER; note = 2'-O-methyl modified nucleotide with phosphorothioate linkage
  modified_base 129: mod_base = OTHER; note = 2'-O-methyl modified nucleotide with phosphorothioate linkage
  modified_base 130: mod_base = OTHER; note = 2'-O-methyl modified nucleotide

SEQ ID NO: 29275 - RNA, 129 nt, synthetic construct; identical to SEQ ID NO: 28713
  source 1..129: mol_type = other RNA
  modified_base 1: mod_base = OTHER; note = 2'-O-methyl modified nucleotide with phosphorothioate linkage
  modified_base 2: mod_base = OTHER; note = 2'-O-methyl modified nucleotide with phosphorothioate linkage
  modified_base 3: mod_base = OTHER; note = 2'-O-methyl modified nucleotide with phosphorothioate linkage
  modified_base 126: mod_base = OTHER; note = Nucleotide with phosphorothioate linkage
  modified_base 127: mod_base = OTHER; note = 2'-O-methyl modified nucleotide with phosphorothioate linkage
  modified_base 128: mod_base = OTHER; note = 2'-O-methyl modified nucleotide with phosphorothioate linkage
  modified_base 129: mod_base = OTHER; note = 2'-O-methyl modified nucleotide

SEQ ID NO: 29276 - RNA, 128 nt, synthetic construct; identical to SEQ ID NO: 28714
  source 1..128: mol_type = other RNA
  modified_base 1: mod_base = OTHER; note = 2'-O-methyl modified nucleotide with phosphorothioate linkage
  modified_base 2: mod_base = OTHER; note = 2'-O-methyl modified nucleotide with phosphorothioate linkage
  modified_base 3: mod_base = OTHER; note = 2'-O-methyl modified nucleotide with phosphorothioate linkage
  modified_base 125: mod_base = OTHER; note = Nucleotide with phosphorothioate linkage
  modified_base 126: mod_base = OTHER; note = 2'-O-methyl modified nucleotide with phosphorothioate linkage
  modified_base 127: mod_base = OTHER; note = 2'-O-methyl modified nucleotide with phosphorothioate linkage
  modified_base 128: mod_base = OTHER; note = 2'-O-methyl modified nucleotide

SEQ ID NO: 29277 - RNA, 127 nt, synthetic construct; identical to SEQ ID NO: 28715
  source 1..127: mol_type = other RNA
  modified_base 1: mod_base = OTHER; note = 2'-O-methyl modified nucleotide with phosphorothioate linkage
  modified_base 2: mod_base = OTHER; note = 2'-O-methyl modified nucleotide with phosphorothioate linkage
  modified_base 3: mod_base = OTHER; note = 2'-O-methyl modified nucleotide with phosphorothioate linkage
  modified_base 124: mod_base = OTHER; note = Nucleotide with phosphorothioate linkage
  modified_base 125: mod_base = OTHER; note = 2'-O-methyl modified nucleotide with phosphorothioate linkage
  modified_base 126: mod_base = OTHER; note = 2'-O-methyl modified nucleotide with phosphorothioate linkage
  modified_base 127: mod_base = OTHER; note = 2'-O-methyl modified nucleotide

SEQ ID NO: 29278 - RNA, 139 nt, synthetic construct; identical to SEQ ID NO: 28716
  source 1..139: mol_type = other RNA
  modified_base 1: mod_base = OTHER; note = 2'-O-methyl modified nucleotide with phosphorothioate linkage
  modified_base 2: mod_base = OTHER; note = 2'-O-methyl modified nucleotide with phosphorothioate linkage
  modified_base 3: mod_base = OTHER; note = 2'-O-methyl modified nucleotide with phosphorothioate linkage
  modified_base 136: mod_base = OTHER; note = Nucleotide with phosphorothioate linkage
  modified_base 137: mod_base = OTHER; note = 2'-O-methyl modified nucleotide with phosphorothioate linkage
  modified_base 138: mod_base = OTHER; note = 2'-O-methyl modified nucleotide with phosphorothioate linkage
  modified_base 139: mod_base = OTHER; note = 2'-O-methyl modified nucleotide

SEQ ID NO: 29279 - RNA, 138 nt, synthetic construct; identical to SEQ ID NO: 28717
  source 1..138: mol_type = other RNA
  modified_base 1: mod_base = OTHER; note = 2'-O-methyl modified nucleotide with phosphorothioate linkage
  modified_base 2: mod_base = OTHER; note = 2'-O-methyl modified nucleotide with phosphorothioate linkage
  modified_base 3: mod_base = OTHER; note = 2'-O-methyl modified nucleotide with phosphorothioate linkage
  modified_base 135: mod_base = OTHER; note = Nucleotide with phosphorothioate linkage
  modified_base 136: mod_base = OTHER; note = 2'-O-methyl modified nucleotide with phosphorothioate linkage
  modified_base 137: mod_base = OTHER; note = 2'-O-methyl modified nucleotide with phosphorothioate linkage
  modified_base 138: mod_base = OTHER; note = 2'-O-methyl modified nucleotide

SEQ ID NO: 29280 - RNA, 137 nt, synthetic construct; identical to SEQ ID NO: 28718
  source 1..137: mol_type = other RNA
  modified_base 1: mod_base = OTHER; note = 2'-O-methyl modified nucleotide with phosphorothioate linkage
  modified_base 2: mod_base = OTHER; note = 2'-O-methyl modified nucleotide with phosphorothioate linkage
  modified_base 3: mod_base = OTHER; note = 2'-O-methyl modified nucleotide with phosphorothioate linkage
  modified_base 134: mod_base = OTHER; note = Nucleotide with phosphorothioate linkage
  modified_base 135: mod_base = OTHER; note = 2'-O-methyl modified nucleotide with phosphorothioate linkage
  modified_base 136: mod_base = OTHER; note = 2'-O-methyl modified nucleotide with phosphorothioate linkage
  modified_base 137: mod_base = OTHER; note = 2'-O-methyl modified nucleotide

SEQ ID NO: 29281 - RNA, 136 nt, synthetic construct; identical to SEQ ID NO: 28719
  source 1..136: mol_type = other RNA
  modified_base 1: mod_base = OTHER; note = 2'-O-methyl modified nucleotide with phosphorothioate linkage
  modified_base 2: mod_base = OTHER; note = 2'-O-methyl modified nucleotide with phosphorothioate linkage
  modified_base 3: mod_base = OTHER; note = 2'-O-methyl modified nucleotide with phosphorothioate linkage
  modified_base 133: mod_base = OTHER; note = Nucleotide with phosphorothioate linkage
  modified_base 134: mod_base = OTHER; note = 2'-O-methyl modified nucleotide with phosphorothioate linkage
  modified_base 135: mod_base = OTHER; note = 2'-O-methyl modified nucleotide with phosphorothioate linkage
  modified_base 136: mod_base = OTHER; note = 2'-O-methyl modified nucleotide

SEQ ID NO: 29282 - RNA, 135 nt, synthetic construct; identical to SEQ ID NO: 28720
  source 1..135: mol_type = other RNA
  modified_base 1: mod_base = OTHER; note = 2'-O-methyl modified nucleotide with phosphorothioate linkage
  modified_base 2: mod_base = OTHER; note = 2'-O-methyl modified nucleotide with phosphorothioate linkage
  modified_base 3: mod_base = OTHER; note = 2'-O-methyl modified nucleotide with phosphorothioate linkage
  modified_base 132: mod_base = OTHER; note = Nucleotide with phosphorothioate linkage
  modified_base 133: mod_base = OTHER; note = 2'-O-methyl modified nucleotide with phosphorothioate linkage
  modified_base 134: mod_base = OTHER; note = 2'-O-methyl modified nucleotide with phosphorothioate linkage
  modified_base 135: mod_base = OTHER; note = 2'-O-methyl modified nucleotide

SEQ ID NO: 29283 - RNA, 134 nt, synthetic construct; identical to SEQ ID NO: 28721
  source 1..134: mol_type = other RNA
  modified_base 1: mod_base = OTHER; note = 2'-O-methyl modified nucleotide with phosphorothioate linkage
  modified_base 2: mod_base = OTHER; note = 2'-O-methyl modified nucleotide with phosphorothioate linkage
  modified_base 3: mod_base = OTHER; note = 2'-O-methyl modified nucleotide with phosphorothioate linkage
  modified_base 131: mod_base = OTHER; note = Nucleotide with phosphorothioate linkage
  modified_base 132: mod_base = OTHER; note = 2'-O-methyl modified nucleotide with phosphorothioate linkage
  modified_base 133: mod_base = OTHER; note = 2'-O-methyl modified nucleotide with phosphorothioate linkage
  modified_base 134: mod_base = OTHER; note = 2'-O-methyl modified nucleotide

SEQ ID NO: 29284 - RNA, 133 nt, synthetic construct; identical to SEQ ID NO: 28722
  source 1..133: mol_type = other RNA
  modified_base 1: mod_base = OTHER; note = 2'-O-methyl modified nucleotide with phosphorothioate linkage
  modified_base 2: mod_base = OTHER; note = 2'-O-methyl modified nucleotide with phosphorothioate linkage
  modified_base 3: mod_base = OTHER; note = 2'-O-methyl modified nucleotide with phosphorothioate linkage
  modified_base 130: mod_base = OTHER; note = Nucleotide with phosphorothioate linkage
  modified_base 131: mod_base = OTHER; note = 2'-O-methyl modified nucleotide with phosphorothioate linkage
  modified_base 132: mod_base = OTHER; note = 2'-O-methyl modified nucleotide with phosphorothioate linkage
  modified_base 133: mod_base = OTHER; note = 2'-O-methyl modified nucleotide

SEQ ID NO: 29285 - RNA, 132 nt, synthetic construct; identical to SEQ ID NO: 28723
  source 1..132: mol_type = other RNA
  modified_base 1: mod_base = OTHER; note = 2'-O-methyl modified nucleotide with phosphorothioate linkage
  modified_base 2: mod_base = OTHER; note = 2'-O-methyl modified nucleotide with phosphorothioate linkage
  modified_base 3: mod_base = OTHER; note = 2'-O-methyl modified nucleotide with phosphorothioate linkage
  modified_base 129: mod_base = OTHER; note = Nucleotide with phosphorothioate linkage
  modified_base 130: mod_base = OTHER; note = 2'-O-methyl modified nucleotide with phosphorothioate linkage
  modified_base 131: mod_base = OTHER; note = 2'-O-methyl modified nucleotide with phosphorothioate linkage
  modified_base 132: mod_base = OTHER; note = 2'-O-methyl modified nucleotide

SEQ ID NO: 29286 - RNA, 131 nt, synthetic construct; identical to SEQ ID NO: 28724
  source 1..131: mol_type = other RNA
  modified_base 1: mod_base = OTHER; note = 2'-O-methyl modified nucleotide with phosphorothioate linkage
  modified_base 2: mod_base = OTHER; note = 2'-O-methyl modified nucleotide with phosphorothioate linkage
  modified_base 3: mod_base = OTHER; note = 2'-O-methyl modified nucleotide with phosphorothioate linkage
  modified_base 128: mod_base = OTHER; note = Nucleotide with phosphorothioate linkage
  modified_base 129: mod_base = OTHER; note = 2'-O-methyl modified nucleotide with phosphorothioate linkage
  modified_base 130: mod_base = OTHER; note = 2'-O-methyl modified nucleotide with phosphorothioate linkage
  modified_base 131: mod_base = OTHER; note = 2'-O-methyl modified nucleotide

SEQ ID NO: 29287 - RNA, 130 nt, synthetic construct; identical to SEQ ID NO: 28725
  source 1..130: mol_type = other RNA
  modified_base 1: mod_base = OTHER; note = 2'-O-methyl modified nucleotide with phosphorothioate linkage
  modified_base 2: mod_base = OTHER; note = 2'-O-methyl modified nucleotide with phosphorothioate linkage
  modified_base 3: mod_base = OTHER; note = 2'-O-methyl modified nucleotide with phosphorothioate linkage
  modified_base 127: mod_base = OTHER; note = Nucleotide with phosphorothioate linkage
  modified_base 128: mod_base = OTHER; note = 2'-O-methyl modified nucleotide with phosphorothioate linkage
  modified_base 129: mod_base = OTHER; note = 2'-O-methyl modified nucleotide with phosphorothioate linkage
  modified_base 130: mod_base = OTHER; note = 2'-O-methyl modified nucleotide

SEQ ID NO: 29288 - RNA, 129 nt, synthetic construct; identical to SEQ ID NO: 28726
  source 1..129: mol_type = other RNA
  modified_base 1: mod_base = OTHER; note = 2'-O-methyl modified nucleotide with phosphorothioate linkage
  modified_base 2: mod_base = OTHER; note = 2'-O-methyl modified nucleotide with phosphorothioate linkage
  modified_base 3: mod_base = OTHER; note = 2'-O-methyl modified nucleotide with phosphorothioate linkage
  modified_base 126: mod_base = OTHER; note = Nucleotide with phosphorothioate linkage
  modified_base 127: mod_base = OTHER; note = 2'-O-methyl modified nucleotide with phosphorothioate linkage
  modified_base 128: mod_base = OTHER; note = 2'-O-methyl modified nucleotide with phosphorothioate linkage
  modified_base 129: mod_base = OTHER; note = 2'-O-methyl modified nucleotide

SEQ ID NO: 29289 - RNA, 128 nt, synthetic construct; identical to SEQ ID NO: 28727
  source 1..128: mol_type = other RNA
  modified_base 1: mod_base = OTHER; note = 2'-O-methyl modified nucleotide with phosphorothioate linkage
  modified_base 2: mod_base = OTHER; note = 2'-O-methyl modified nucleotide with phosphorothioate linkage
  modified_base 3: mod_base = OTHER; note = 2'-O-methyl modified nucleotide with phosphorothioate linkage
  modified_base 125: mod_base = OTHER; note = Nucleotide with phosphorothioate linkage
  modified_base 126: mod_base = OTHER; note = 2'-O-methyl modified nucleotide with phosphorothioate linkage
  modified_base 127: mod_base = OTHER; note = 2'-O-methyl modified nucleotide with phosphorothioate linkage
  modified_base 128: mod_base = OTHER; note = 2'-O-methyl modified nucleotide

SEQ ID NO: 29290 - RNA, 140 nt, synthetic construct; identical to SEQ ID NO: 28728
  source 1..140: mol_type = other RNA
  modified_base 1: mod_base = OTHER; note = 2'-O-methyl modified nucleotide with phosphorothioate linkage
  modified_base 2: mod_base = OTHER; note = 2'-O-methyl modified nucleotide with phosphorothioate linkage
  modified_base 3: mod_base = OTHER; note = 2'-O-methyl modified nucleotide with phosphorothioate linkage
  modified_base 137: mod_base = OTHER; note = Nucleotide with phosphorothioate linkage
  modified_base 138: mod_base = OTHER; note = 2'-O-methyl modified nucleotide with phosphorothioate linkage
  modified_base 139: mod_base = OTHER; note = 2'-O-methyl modified nucleotide with phosphorothioate linkage
  modified_base 140: mod_base = OTHER; note = 2'-O-methyl modified nucleotide

SEQ ID NO: 29291 - RNA, 139 nt, synthetic construct; identical to SEQ ID NO: 28729
  source 1..139: mol_type = other RNA
  modified_base 1: mod_base = OTHER; note = 2'-O-methyl modified nucleotide with phosphorothioate linkage
  modified_base 2: mod_base = OTHER; note = 2'-O-methyl modified nucleotide with phosphorothioate linkage
  modified_base 3: mod_base = OTHER; note = 2'-O-methyl modified nucleotide with phosphorothioate linkage
  modified_base 136: mod_base = OTHER; note = Nucleotide with phosphorothioate linkage
  modified_base 137: mod_base = OTHER; note = 2'-O-methyl modified nucleotide with phosphorothioate linkage
  modified_base 138: mod_base = OTHER; note = 2'-O-methyl modified nucleotide with phosphorothioate linkage
  modified_base 139: mod_base = OTHER; note = 2'-O-methyl modified nucleotide

SEQ ID NO: 29292 - RNA, 138 nt, synthetic construct; identical to SEQ ID NO: 28730
  source 1..138: mol_type = other RNA
  modified_base 1: mod_base = OTHER; note = 2'-O-methyl modified nucleotide with phosphorothioate linkage
  modified_base 2: mod_base = OTHER; note = 2'-O-methyl modified nucleotide with phosphorothioate linkage
  modified_base 3: mod_base = OTHER; note = 2'-O-methyl modified nucleotide with phosphorothioate linkage
  modified_base 135: mod_base = OTHER; note = Nucleotide with phosphorothioate linkage
  modified_base 136: mod_base = OTHER; note = 2'-O-methyl modified nucleotide with phosphorothioate linkage
  modified_base 137: mod_base = OTHER; note = 2'-O-methyl modified nucleotide with phosphorothioate linkage
  modified_base 138: mod_base = OTHER; note = 2'-O-methyl modified nucleotide

SEQ ID NO: 29293 - RNA, 137 nt, synthetic construct; identical to SEQ ID NO: 28731
  source 1..137: mol_type = other RNA
  modified_base 1: mod_base = OTHER; note = 2'-O-methyl modified nucleotide with phosphorothioate linkage
  modified_base 2: mod_base = OTHER; note = 2'-O-methyl modified nucleotide with phosphorothioate linkage
  modified_base 3: mod_base = OTHER; note = 2'-O-methyl modified nucleotide with phosphorothioate linkage
  modified_base 134: mod_base = OTHER; note = Nucleotide with phosphorothioate linkage
  modified_base 135: mod_base = OTHER; note = 2'-O-methyl modified nucleotide with phosphorothioate linkage
  modified_base 136: mod_base = OTHER; note = 2'-O-methyl modified nucleotide with phosphorothioate linkage
  modified_base 137: mod_base = OTHER; note = 2'-O-methyl modified nucleotide

SEQ ID NO: 29294 - RNA, 136 nt, synthetic construct; identical to SEQ ID NO: 28732
  source 1..136: mol_type = other RNA
  modified_base 1: mod_base = OTHER; note = 2'-O-methyl modified nucleotide with phosphorothioate linkage
  modified_base 2: mod_base = OTHER; note = 2'-O-methyl modified nucleotide with phosphorothioate linkage
  modified_base 3: mod_base = OTHER; note = 2'-O-methyl modified nucleotide with phosphorothioate linkage
  modified_base 133: mod_base = OTHER; note = Nucleotide with phosphorothioate linkage
  modified_base 134: mod_base = OTHER; note = 2'-O-methyl modified nucleotide with phosphorothioate linkage
  modified_base 135: mod_base = OTHER; note = 2'-O-methyl modified nucleotide with phosphorothioate linkage
  modified_base 136: mod_base = OTHER; note = 2'-O-methyl modified nucleotide

SEQ ID NO: 29295 - RNA, 135 nt, synthetic construct; identical to SEQ ID NO: 28733
  source 1..135: mol_type = other RNA
  modified_base 1: mod_base = OTHER; note = 2'-O-methyl modified nucleotide with phosphorothioate linkage
  modified_base 2: mod_base = OTHER; note = 2'-O-methyl modified nucleotide with phosphorothioate linkage
  modified_base 3: mod_base = OTHER; note = 2'-O-methyl modified nucleotide with phosphorothioate linkage
  modified_base 132: mod_base = OTHER; note = Nucleotide with phosphorothioate linkage
  modified_base 133: mod_base = OTHER; note = 2'-O-methyl modified nucleotide with phosphorothioate linkage
  modified_base 134: mod_base = OTHER; note = 2'-O-methyl modified nucleotide with phosphorothioate linkage
  modified_base 135: mod_base = OTHER; note = 2'-O-methyl modified nucleotide

SEQ ID NO: 29296 - RNA, 134 nt, synthetic construct; identical to SEQ ID NO: 28734
  source 1..134: mol_type = other RNA
  modified_base 1: mod_base = OTHER; note = 2'-O-methyl modified nucleotide with phosphorothioate linkage
  modified_base 2: mod_base = OTHER; note = 2'-O-methyl modified nucleotide with phosphorothioate linkage
  modified_base 3: mod_base = OTHER; note = 2'-O-methyl modified nucleotide with phosphorothioate linkage
  modified_base 131: mod_base = OTHER; note = Nucleotide with phosphorothioate linkage
  modified_base 132: mod_base = OTHER; note = 2'-O-methyl modified nucleotide with phosphorothioate linkage
  modified_base 133: mod_base = OTHER; note = 2'-O-methyl modified nucleotide with phosphorothioate linkage
  modified_base 134: mod_base = OTHER; note = 2'-O-methyl modified nucleotide

SEQ ID NO: 29297 - RNA, 133 nt, synthetic construct; identical to SEQ ID NO: 28735
  source 1..133: mol_type = other RNA
  modified_base 1: mod_base = OTHER; note = 2'-O-methyl modified nucleotide with phosphorothioate linkage
  modified_base 2: mod_base = OTHER; note = 2'-O-methyl modified nucleotide with phosphorothioate linkage
  modified_base 3: mod_base = OTHER; note = 2'-O-methyl modified nucleotide with phosphorothioate linkage
  modified_base 130: mod_base = OTHER; note = Nucleotide with phosphorothioate linkage
  modified_base 131: mod_base = OTHER; note = 2'-O-methyl modified nucleotide with phosphorothioate linkage
  modified_base 132: mod_base = OTHER; note = 2'-O-methyl modified nucleotide with phosphorothioate linkage
  modified_base 133: mod_base = OTHER; note = 2'-O-methyl modified nucleotide

SEQ ID NO: 29298 - RNA, 132 nt, synthetic construct; identical to SEQ ID NO: 28736
  source 1..132: mol_type = other RNA
  modified_base 1: mod_base = OTHER; note = 2'-O-methyl modified nucleotide with phosphorothioate linkage
  modified_base 2: mod_base = OTHER; note = 2'-O-methyl modified nucleotide with phosphorothioate linkage
  modified_base 3: mod_base = OTHER; note = 2'-O-methyl modified nucleotide with phosphorothioate linkage
  modified_base 129: mod_base = OTHER; note = Nucleotide with phosphorothioate linkage
  modified_base 130: mod_base = OTHER; note = 2'-O-methyl modified nucleotide with phosphorothioate linkage
  modified_base 131: mod_base = OTHER; note = 2'-O-methyl modified nucleotide with phosphorothioate linkage
  modified_base 132: mod_base = OTHER; note = 2'-O-methyl modified nucleotide

SEQ ID NO: 29299 - RNA, 131 nt, synthetic construct; identical to SEQ ID NO: 28737
  source 1..131: mol_type = other RNA
  modified_base 1: mod_base = OTHER; note = 2'-O-methyl modified nucleotide with phosphorothioate linkage
  modified_base 2: mod_base = OTHER; note = 2'-O-methyl modified nucleotide with phosphorothioate linkage
  modified_base 3: mod_base = OTHER; note = 2'-O-methyl modified nucleotide with phosphorothioate linkage
  modified_base 128: mod_base = OTHER; note = Nucleotide with phosphorothioate linkage
  modified_base 129: mod_base = OTHER; note = 2'-O-methyl modified nucleotide with phosphorothioate linkage
  modified_base 130: mod_base = OTHER; note = 2'-O-methyl modified nucleotide with phosphorothioate linkage
  modified_base 131: mod_base = OTHER; note = 2'-O-methyl modified nucleotide

SEQ ID NO: 29300 - RNA, 130 nt, synthetic construct; identical to SEQ ID NO: 28738
  source 1..130: mol_type = other RNA
  modified_base 1: mod_base = OTHER; note = 2'-O-methyl modified nucleotide with phosphorothioate linkage
  modified_base 2: mod_base = OTHER; note = 2'-O-methyl modified nucleotide with phosphorothioate linkage
  modified_base 3: mod_base = OTHER; note = 2'-O-methyl modified nucleotide with phosphorothioate linkage
  modified_base 127: mod_base = OTHER; note = Nucleotide with phosphorothioate linkage
  modified_base 128: mod_base = OTHER; note = 2'-O-methyl modified nucleotide with phosphorothioate linkage
  modified_base 129: mod_base = OTHER; note = 2'-O-methyl modified nucleotide with phosphorothioate linkage
  modified_base 130: mod_base = OTHER; note = 2'-O-methyl modified nucleotide

SEQ ID NO: 29301 - RNA, 129 nt, synthetic construct; identical to SEQ ID NO: 28739
  source 1..129: mol_type = other RNA
  modified_base 1: mod_base = OTHER; note = 2'-O-methyl modified nucleotide with phosphorothioate linkage
  modified_base 2: mod_base = OTHER; note = 2'-O-methyl modified nucleotide with phosphorothioate linkage
  modified_base 3: mod_base = OTHER; note = 2'-O-methyl modified nucleotide with phosphorothioate linkage
  modified_base 126: mod_base = OTHER; note = Nucleotide with phosphorothioate linkage
  modified_base 127: mod_base = OTHER; note = 2'-O-methyl modified nucleotide with phosphorothioate linkage
  modified_base 128: mod_base = OTHER; note = 2'-O-methyl modified nucleotide with phosphorothioate linkage
  modified_base 129: mod_base = OTHER; note = 2'-O-methyl modified nucleotide

SEQ ID NO: 29302 - RNA, 141 nt, synthetic construct; identical to SEQ ID NO: 28740
  source 1..141: mol_type = other RNA
  modified_base 1: mod_base = OTHER; note = 2'-O-methyl modified nucleotide with phosphorothioate linkage
  modified_base 2: mod_base = OTHER; note = 2'-O-methyl modified nucleotide with phosphorothioate linkage
  modified_base 3: mod_base = OTHER; note = 2'-O-methyl modified nucleotide with phosphorothioate linkage
  modified_base 138: mod_base = OTHER; note = Nucleotide with phosphorothioate linkage
  modified_base 139: mod_base = OTHER; note = 2'-O-methyl modified nucleotide with phosphorothioate linkage
  modified_base 140: mod_base = OTHER; note = 2'-O-methyl modified nucleotide with phosphorothioate linkage
  modified_base 141: mod_base = OTHER; note = 2'-O-methyl modified nucleotide

SEQ ID NO: 29303 - RNA, 140 nt, synthetic construct; identical to SEQ ID NO: 28741
  source 1..140: mol_type = other RNA
  modified_base 1: mod_base = OTHER; note = 2'-O-methyl modified nucleotide with phosphorothioate linkage
  modified_base 2: mod_base = OTHER; note = 2'-O-methyl modified nucleotide with phosphorothioate linkage
  modified_base 3: mod_base = OTHER; note = 2'-O-methyl modified nucleotide with phosphorothioate linkage
  modified_base 137: mod_base = OTHER; note = Nucleotide with phosphorothioate linkage
  modified_base 138: mod_base = OTHER; note = 2'-O-methyl modified nucleotide with phosphorothioate linkage
  modified_base 139: mod_base = OTHER; note = 2'-O-methyl modified nucleotide with phosphorothioate linkage
  modified_base 140: mod_base = OTHER; note = 2'-O-methyl modified nucleotide

SEQ ID NO: 29304 - RNA, 139 nt, synthetic construct; identical to SEQ ID NO: 28742
  source 1..139: mol_type = other RNA
  modified_base 1: mod_base = OTHER; note = 2'-O-methyl modified nucleotide with phosphorothioate linkage
  modified_base 2: mod_base = OTHER; note = 2'-O-methyl modified nucleotide with phosphorothioate linkage
  modified_base 3: mod_base = OTHER; note = 2'-O-methyl modified nucleotide with phosphorothioate linkage
  modified_base 136: mod_base = OTHER; note = Nucleotide with phosphorothioate linkage
  modified_base 137: mod_base = OTHER; note = 2'-O-methyl modified nucleotide with phosphorothioate linkage
  modified_base 138: mod_base = OTHER; note = 2'-O-methyl modified nucleotide with phosphorothioate linkage
  modified_base 139: mod_base = OTHER; note = 2'-O-methyl modified nucleotide

SEQ ID NO: 29305 - RNA, 138 nt, synthetic construct; identical to SEQ ID NO: 28743
  source 1..138: mol_type = other RNA
  modified_base 1: mod_base = OTHER; note = 2'-O-methyl modified nucleotide with phosphorothioate linkage
  modified_base 2: mod_base = OTHER; note = 2'-O-methyl modified nucleotide with phosphorothioate linkage
  modified_base 3: mod_base = OTHER; note = 2'-O-methyl modified nucleotide with phosphorothioate linkage
  modified_base 135: mod_base = OTHER; note = Nucleotide with phosphorothioate linkage
  modified_base 136: mod_base = OTHER; note = 2'-O-methyl modified nucleotide with phosphorothioate linkage
  modified_base 137: mod_base = OTHER; note = 2'-O-methyl modified nucleotide with phosphorothioate linkage
  modified_base 138: mod_base = OTHER; note = 2'-O-methyl modified nucleotide

SEQ ID NO: 29306 - RNA, 137 nt, synthetic construct; identical to SEQ ID NO: 28744
  source 1..137: mol_type = other RNA
  modified_base 1: mod_base = OTHER; note = 2'-O-methyl modified nucleotide with phosphorothioate linkage
  modified_base 2: mod_base = OTHER; note = 2'-O-methyl modified nucleotide with phosphorothioate linkage
  modified_base 3: mod_base = OTHER; note = 2'-O-methyl modified nucleotide with phosphorothioate linkage
  modified_base 134: mod_base = OTHER; note = Nucleotide with phosphorothioate linkage
  modified_base 135: mod_base = OTHER; note = 2'-O-methyl modified nucleotide with phosphorothioate linkage
  modified_base 136: mod_base = OTHER; note = 2'-O-methyl modified nucleotide with phosphorothioate linkage
  modified_base 137: mod_base = OTHER; note = 2'-O-methyl modified nucleotide

SEQ ID NO: 29307 - RNA, 136 nt, synthetic construct; identical to SEQ ID NO: 28745
  source 1..136: mol_type = other RNA
  modified_base 1: mod_base = OTHER; note = 2'-O-methyl modified nucleotide with phosphorothioate linkage
  modified_base 2: mod_base = OTHER; note = 2'-O-methyl modified nucleotide with phosphorothioate linkage
  modified_base 3: mod_base = OTHER; note = 2'-O-methyl modified nucleotide with phosphorothioate linkage
  modified_base 133: mod_base = OTHER; note = Nucleotide with phosphorothioate linkage
  modified_base 134: mod_base = OTHER; note = 2'-O-methyl modified nucleotide with phosphorothioate linkage
  modified_base 135: mod_base = OTHER; note = 2'-O-methyl modified nucleotide with phosphorothioate linkage
  modified_base 136: mod_base = OTHER; note = 2'-O-methyl modified nucleotide

SEQ ID NO: 29308 - RNA, 135 nt, synthetic construct; identical to SEQ ID NO: 28746
  source 1..135: mol_type = other RNA
  modified_base 1: mod_base = OTHER; note = 2'-O-methyl modified nucleotide with phosphorothioate linkage
  modified_base 2: mod_base = OTHER; note = 2'-O-methyl modified nucleotide with phosphorothioate linkage
  modified_base 3: mod_base = OTHER; note = 2'-O-methyl modified nucleotide with phosphorothioate linkage
  modified_base 132: mod_base = OTHER; note = Nucleotide with phosphorothioate linkage
  modified_base 133: mod_base = OTHER; note = 2'-O-methyl modified nucleotide with phosphorothioate linkage
  modified_base 134: mod_base = OTHER; note = 2'-O-methyl modified nucleotide with phosphorothioate linkage
  modified_base 135: mod_base = OTHER; note = 2'-O-methyl modified nucleotide

SEQ ID NO: 29309 - RNA, 134 nt, synthetic construct; identical to SEQ ID NO: 28747
  source 1..134: mol_type = other RNA
  modified_base 1: mod_base = OTHER; note = 2'-O-methyl modified nucleotide with phosphorothioate linkage
  modified_base 2: mod_base = OTHER; note = 2'-O-methyl modified nucleotide with phosphorothioate linkage
  modified_base 3: mod_base = OTHER; note = 2'-O-methyl modified nucleotide with phosphorothioate linkage
  modified_base 131: mod_base = OTHER; note = Nucleotide with phosphorothioate linkage
  modified_base 132: mod_base = OTHER; note = 2'-O-methyl modified nucleotide with phosphorothioate linkage
  modified_base 133: mod_base = OTHER; note = 2'-O-methyl modified nucleotide with phosphorothioate linkage
  modified_base 134: mod_base = OTHER; note = 2'-O-methyl modified nucleotide

SEQ ID NO: 29310 - RNA, 133 nt, synthetic construct; identical to SEQ ID NO: 28748
  source 1..133: mol_type = other RNA
  modified_base 1: mod_base = OTHER; note = 2'-O-methyl modified nucleotide with phosphorothioate linkage
  modified_base 2: mod_base = OTHER; note = 2'-O-methyl modified nucleotide with phosphorothioate linkage
  modified_base 3: mod_base = OTHER; note = 2'-O-methyl modified nucleotide with phosphorothioate linkage
  modified_base 130: mod_base = OTHER; note = Nucleotide with phosphorothioate linkage
  modified_base 131: mod_base = OTHER; note = 2'-O-methyl modified nucleotide with phosphorothioate linkage
  modified_base 132: mod_base = OTHER; note = 2'-O-methyl modified nucleotide with phosphorothioate linkage
  modified_base 133: mod_base = OTHER; note = 2'-O-methyl modified nucleotide

SEQ ID NO: 29311 - RNA, 132 nt, synthetic construct; identical to SEQ ID NO: 28749
  source 1..132: mol_type = other RNA
  modified_base 1: mod_base = OTHER; note = 2'-O-methyl modified nucleotide with phosphorothioate linkage
  modified_base 2: mod_base = OTHER; note = 2'-O-methyl modified nucleotide with phosphorothioate linkage
  modified_base 3: mod_base = OTHER; note = 2'-O-methyl modified nucleotide with phosphorothioate linkage
  modified_base 129: mod_base = OTHER; note = Nucleotide with phosphorothioate linkage
  modified_base 130: mod_base = OTHER; note = 2'-O-methyl modified nucleotide with phosphorothioate linkage
  modified_base 131: mod_base = OTHER; note = 2'-O-methyl modified nucleotide with phosphorothioate linkage
  modified_base 132: mod_base = OTHER; note = 2'-O-methyl modified nucleotide

SEQ ID NO: 29312 - RNA, 131 nt, synthetic construct; identical to SEQ ID NO: 28750
  source 1..131: mol_type = other RNA
  modified_base 1: mod_base = OTHER; note = 2'-O-methyl modified nucleotide with phosphorothioate linkage
  modified_base 2: mod_base = OTHER; note = 2'-O-methyl modified nucleotide with phosphorothioate linkage
  modified_base 3: mod_base = OTHER; note = 2'-O-methyl modified nucleotide with phosphorothioate linkage
  modified_base 128: mod_base = OTHER; note = Nucleotide with phosphorothioate linkage
  modified_base 129: mod_base = OTHER; note = 2'-O-methyl modified nucleotide with phosphorothioate linkage
  modified_base 130: mod_base = OTHER; note = 2'-O-methyl modified nucleotide with phosphorothioate linkage
  modified_base 131: mod_base = OTHER; note = 2'-O-methyl modified nucleotide

SEQ ID NO: 29313 - RNA, 130 nt, synthetic construct; identical to SEQ ID NO: 28751
  source 1..130: mol_type = other RNA
  modified_base 1: mod_base = OTHER; note = 2'-O-methyl modified nucleotide with phosphorothioate linkage
  modified_base 2: mod_base = OTHER; note = 2'-O-methyl modified nucleotide with phosphorothioate linkage
  modified_base 3: mod_base = OTHER; note = 2'-O-methyl modified nucleotide with phosphorothioate linkage
  modified_base 127: mod_base = OTHER; note = Nucleotide with phosphorothioate linkage
  modified_base 128: mod_base = OTHER; note = 2'-O-methyl modified nucleotide with phosphorothioate linkage
  modified_base 129: mod_base = OTHER; note = 2'-O-methyl modified nucleotide with phosphorothioate linkage
  modified_base 130: mod_base = OTHER; note = 2'-O-methyl modified nucleotide

SEQ ID NO: 29314 - RNA, 142 nt, synthetic construct; identical to SEQ ID NO: 28752
  source 1..142: mol_type = other RNA
  modified_base 1: mod_base = OTHER; note = 2'-O-methyl modified nucleotide with phosphorothioate linkage
  modified_base 2: mod_base = OTHER; note = 2'-O-methyl modified nucleotide with phosphorothioate linkage
  modified_base 3: mod_base = OTHER; note = 2'-O-methyl modified nucleotide with phosphorothioate linkage
  modified_base 139: mod_base = OTHER; note = Nucleotide with phosphorothioate linkage
  modified_base 140: mod_base = OTHER; note = 2'-O-methyl modified nucleotide with phosphorothioate linkage
  modified_base 141: mod_base = OTHER; note = 2'-O-methyl modified nucleotide with phosphorothioate linkage
  modified_base 142: mod_base = OTHER; note = 2'-O-methyl modified nucleotide

SEQ ID NO: 29315 - RNA, 141 nt, synthetic construct; identical to SEQ ID NO: 28753
  source 1..141: mol_type = other RNA
  modified_base 1: mod_base = OTHER; note = 2'-O-methyl modified nucleotide with phosphorothioate linkage
  modified_base 2: mod_base = OTHER; note = 2'-O-methyl modified nucleotide with phosphorothioate linkage
  modified_base 3: mod_base = OTHER; note = 2'-O-methyl modified nucleotide with phosphorothioate linkage
  modified_base 138: mod_base = OTHER; note = Nucleotide with phosphorothioate linkage
  modified_base 139: mod_base = OTHER; note = 2'-O-methyl modified nucleotide with phosphorothioate linkage
  modified_base 140: mod_base = OTHER; note = 2'-O-methyl modified nucleotide with phosphorothioate linkage
  modified_base 141: mod_base = OTHER; note = 2'-O-methyl modified nucleotide

SEQ ID NO: 29316 - RNA, 140 nt, synthetic construct; identical to SEQ ID NO: 28754
  source 1..140: mol_type = other RNA
  modified_base 1: mod_base = OTHER; note = 2'-O-methyl modified nucleotide with phosphorothioate linkage
  modified_base 2: mod_base = OTHER; note = 2'-O-methyl modified nucleotide with phosphorothioate linkage
  modified_base 3: mod_base = OTHER; note = 2'-O-methyl modified nucleotide with phosphorothioate linkage
  modified_base 137: mod_base = OTHER; note = Nucleotide with phosphorothioate linkage
  modified_base 138: mod_base = OTHER; note = 2'-O-methyl modified nucleotide with phosphorothioate linkage
  modified_base 139: mod_base = OTHER; note = 2'-O-methyl modified nucleotide with phosphorothioate linkage
  modified_base 140: mod_base = OTHER; note = 2'-O-methyl modified nucleotide

SEQ ID NO: 29317 - RNA, 139 nt, synthetic construct; identical to SEQ ID NO: 28755
  source 1..139: mol_type = other RNA
  modified_base 1: mod_base = OTHER; note = 2'-O-methyl modified nucleotide with phosphorothioate linkage
  modified_base 2: mod_base = OTHER; note = 2'-O-methyl modified nucleotide with phosphorothioate linkage
  modified_base 3: mod_base = OTHER; note = 2'-O-methyl modified nucleotide with phosphorothioate linkage
  modified_base 136: mod_base = OTHER; note = Nucleotide with phosphorothioate linkage
  modified_base 137: mod_base = OTHER; note = 2'-O-methyl modified nucleotide with phosphorothioate linkage
  modified_base 138: mod_base = OTHER; note = 2'-O-methyl modified nucleotide with phosphorothioate linkage
  modified_base 139: mod_base = OTHER; note = 2'-O-methyl modified nucleotide

SEQ ID NO: 29318 - RNA, 138 nt, synthetic construct; identical to SEQ ID NO: 28756
  source 1..138: mol_type = other RNA
  modified_base 1: mod_base = OTHER; note = 2'-O-methyl modified nucleotide with phosphorothioate linkage
  modified_base 2: mod_base = OTHER; note = 2'-O-methyl modified nucleotide with phosphorothioate linkage
  modified_base 3: mod_base = OTHER; note = 2'-O-methyl modified nucleotide with phosphorothioate linkage
  modified_base 135: mod_base = OTHER; note = Nucleotide with phosphorothioate linkage
  modified_base 136: mod_base = OTHER; note = 2'-O-methyl modified nucleotide with phosphorothioate linkage
  modified_base 137: mod_base = OTHER; note = 2'-O-methyl modified nucleotide with phosphorothioate linkage
  modified_base 138: mod_base = OTHER; note = 2'-O-methyl modified nucleotide

SEQ ID NO: 29319 - RNA, 137 nt, synthetic construct; identical to SEQ ID NO: 28757
  source 1..137: mol_type = other RNA
  modified_base 1: mod_base = OTHER; note = 2'-O-methyl modified nucleotide with phosphorothioate linkage
  modified_base 2: mod_base = OTHER; note = 2'-O-methyl modified nucleotide with phosphorothioate linkage
  modified_base 3: mod_base = OTHER; note = 2'-O-methyl modified nucleotide with phosphorothioate linkage
  modified_base 134: mod_base = OTHER; note = Nucleotide with phosphorothioate linkage
  modified_base 135: mod_base = OTHER; note = 2'-O-methyl modified nucleotide with phosphorothioate linkage
  modified_base 136: mod_base = OTHER; note = 2'-O-methyl modified nucleotide with phosphorothioate linkage
  modified_base 137: mod_base = OTHER; note = 2'-O-methyl modified nucleotide

SEQ ID NO: 29320 - RNA, 136 nt, synthetic construct; identical to SEQ ID NO: 28758
  source 1..136: mol_type = other RNA
  modified_base 1: mod_base = OTHER; note = 2'-O-methyl modified nucleotide with phosphorothioate linkage
  modified_base 2: mod_base = OTHER; note = 2'-O-methyl modified nucleotide with phosphorothioate linkage
  modified_base 3: mod_base = OTHER; note = 2'-O-methyl modified nucleotide with phosphorothioate linkage
  modified_base 133: mod_base = OTHER; note = Nucleotide with phosphorothioate linkage
  modified_base 134: mod_base = OTHER; note = 2'-O-methyl modified nucleotide with phosphorothioate linkage
  modified_base 135: mod_base = OTHER; note = 2'-O-methyl modified nucleotide with phosphorothioate linkage
  modified_base 136: mod_base = OTHER; note = 2'-O-methyl modified nucleotide

SEQ ID NO: 29321 - RNA, 135 nt, synthetic construct; identical to SEQ ID NO: 28759
  source 1..135: mol_type = other RNA
  modified_base 1: mod_base = OTHER; note = 2'-O-methyl modified nucleotide with phosphorothioate linkage
  modified_base 2: mod_base = OTHER; note = 2'-O-methyl modified nucleotide with phosphorothioate linkage
  modified_base 3: mod_base = OTHER; note = 2'-O-methyl modified nucleotide with phosphorothioate linkage
  modified_base 132: mod_base = OTHER; note = Nucleotide with phosphorothioate linkage
  modified_base 133: mod_base = OTHER; note = 2'-O-methyl modified nucleotide with phosphorothioate linkage
  modified_base 134: mod_base = OTHER; note = 2'-O-methyl modified nucleotide with phosphorothioate linkage
  modified_base 135: mod_base = OTHER; note = 2'-O-methyl modified nucleotide

SEQ ID NO: 29322 - RNA, 134 nt, synthetic construct; identical to SEQ ID NO: 28760
  source 1..134: mol_type = other RNA
  modified_base 1: mod_base = OTHER; note = 2'-O-methyl modified nucleotide with phosphorothioate linkage
  modified_base 2: mod_base = OTHER; note = 2'-O-methyl modified nucleotide with phosphorothioate linkage
  modified_base 3: mod_base = OTHER; note = 2'-O-methyl modified nucleotide with phosphorothioate linkage
  modified_base 131: mod_base = OTHER; note = Nucleotide with phosphorothioate linkage
  modified_base 132: mod_base = OTHER; note = 2'-O-methyl modified nucleotide with phosphorothioate linkage
  modified_base 133: mod_base = OTHER; note = 2'-O-methyl modified nucleotide with phosphorothioate linkage
  modified_base 134: mod_base = OTHER; note = 2'-O-methyl modified nucleotide

SEQ ID NO: 29323 - RNA, 133 nt, synthetic construct; identical to SEQ ID NO: 28761
  source 1..133: mol_type = other RNA
  modified_base 1: mod_base = OTHER; note = 2'-O-methyl modified nucleotide with phosphorothioate linkage
  modified_base 2: mod_base = OTHER; note = 2'-O-methyl modified nucleotide with phosphorothioate linkage
  modified_base 3: mod_base = OTHER; note = 2'-O-methyl modified nucleotide with phosphorothioate linkage
  modified_base 130: mod_base = OTHER; note = Nucleotide with phosphorothioate linkage
  modified_base 131: mod_base = OTHER; note = 2'-O-methyl modified nucleotide with phosphorothioate linkage
  modified_base 132: mod_base = OTHER; note = 2'-O-methyl modified nucleotide with phosphorothioate linkage
  modified_base 133: mod_base = OTHER; note = 2'-O-methyl modified nucleotide

SEQ ID NO: 29324 - RNA, 20 nt, synthetic construct
  source 1..20: mol_type = other RNA
aaggctgtgctgaccatcga

SEQ ID NO: 29325 - RNA, 21 nt, synthetic construct
  source 1..21: mol_type = other RNA
taaggctgtgctgaccatcga

SEQ ID NO: 29326 - RNA, 22 nt, synthetic construct
  source 1..22: mol_type = other RNA
ataaggctgtgctgaccatcga

SEQ ID NO: 29327 - RNA, 23 nt, synthetic construct
  source 1..23: mol_type = other RNA
cataaggctgtgctgaccatcga

SEQ ID NO: 29328 - RNA, 24 nt, synthetic construct
  source 1..24: mol_type = other RNA
gcataaggctgtgctgaccatcga

SEQ ID NO: 29329 - RNA, 25 nt, synthetic construct
  source 1..25: mol_type = other RNA
tgcataaggctgtgctgaccatcga

SEQ ID NO: 29330 - RNA, 26 nt, synthetic construct
  source 1..26: mol_type = other RNA
gtgcataaggctgtgctgaccatcga

SEQ ID NO: 29331 - RNA, 54 nt, synthetic construct; identical to SEQ ID NO: 26000
  source 1..54: mol_type = other RNA

SEQ ID NO: 29332 - RNA, 60 nt, synthetic construct
  source 1..60: mol_type = other RNA
gtctttgtactctcgcgaatacgcgagaagctacaaagataaggcttcatgccgaaatca

SEQ ID NO: 29333 - RNA, 60 nt, synthetic construct
  source 1..60: mol_type = other RNA
gtctttgtactctcgcgagtacgcgagaagctacaaagataaggcttcatgccgaaatca

SEQ ID NO: 29334 - RNA, 60 nt, synthetic construct
  source 1..60: mol_type = other RNA
gtctttgtactctcgcgactacgcgagaagctacaaagataaggcttcatgccgaaatca

SEQ ID NO: 29335 - RNA, 60 nt, synthetic construct
  source 1..60: mol_type = other RNA
gtctttgtactctcgcgattacgcgagaagctacaaagataaggcttcatgccgaaatca

SEQ ID NO: 29336 - RNA, 60 nt, synthetic construct
  source 1..60: mol_type = other RNA
gtctttgtactctcgcgaacacgcgagaagctacaaagataaggcttcatgccgaaatca

SEQ ID NO: 29337 - RNA, 60 nt, synthetic construct
  source 1..60: mol_type = other RNA
gtctttgtactctcgcgagcacgcgagaagctacaaagataaggcttcatgccgaaatca

SEQ ID NO: 29338 - RNA, 60 nt, synthetic construct
  source 1..60: mol_type = other RNA
gtctttgtactctcgcgcttgcgcgagaagctacaaagataaggcttcatgccgaaatca

SEQ ID NO: 29339 - RNA, 60 nt, synthetic construct
  source 1..60: mol_type = other RNA
gtctttgtactctcgcgctcgcgcgagaagctacaaagataaggcttcatgccgaaatca

SEQ ID NO: 29340 - RNA, 60 nt, synthetic construct
  source 1..60: mol_type = other RNA
gtctttgtactctcgcggaaacgcgagaagctacaaagataaggcttcatgccgaaatca

SEQ ID NO: 29341 - RNA, 60 nt, synthetic construct
  source 1..60: mol_type = other RNA
gtctttgtactctcgcggcaacgcgagaagctacaaagataaggcttcatgccgaaatca

SEQ ID NO: 29342 - RNA, 60 nt, synthetic construct
  source 1..60: mol_type = other RNA
gtctttgtactctcgcggtaacgcgagaagctacaaagataaggcttcatgccgaaatca

SEQ ID NO: 29343 - RNA, 60 nt, synthetic construct
  source 1..60: mol_type = other RNA
gtctttgtactctcgcggagacgcgagaagctacaaagataaggcttcatgccgaaatca

SEQ ID NO: 29344 - RNA, 60 nt, synthetic construct
  source 1..60: mol_type = other RNA
gtctttgtactctcgcggggacgcgagaagctacaaagataaggcttcatgccgaaatca

SEQ ID NO: 29345 - RNA, 60 nt, synthetic construct
  source 1..60: mol_type = other RNA
gtctttgtactctcgcgtgaccgcgagaagctacaaagataaggcttcatgccgaaatca

SEQ ID NO: 29346 - RNA, 60 nt, synthetic construct
  source 1..60: mol_type = other RNA
gtctttgtactctcgcgttaccgcgagaagctacaaagataaggcttcatgccgaaatca

SEQ ID NO: 29347 - RNA, 60 nt, synthetic construct
  source 1..60: mol_type = other RNA
gtctttgtactctcgcgttcgcgcgagaagctacaaagataaggcttcatgccgaaatca

SEQ ID NO: 29348 - RNA, 60 nt, synthetic construct
  source 1..60: mol_type = other RNA
gtctttgtactctcgcgggagcgcgagaagctacaaagataaggcttcatgccgaaatca

SEQ ID NO: 29349 - RNA, 60 nt, synthetic construct
  source 1..60: mol_type = other RNA
gtctttgtactctcgcgtgaacgcgagaagctacaaagataaggcttcatgccgaaatca

SEQ ID NO: 29350 - RNA, 61 nt, synthetic construct
  source 1..61: mol_type = other RNA
gtctttgtactctcgcggacaacgcgagaagctacaaagataaggcttcatgccgaaatca

SEQ ID NO: 29351 - RNA, 61 nt, synthetic construct
  source 1..61: mol_type = other RNA
gtctttgtactctcgcggaagacgcgagaagctacaaagataaggcttcatgccgaaatca

SEQ ID NO: 29352 - RNA, 82 nt, synthetic construct
  source 1..82: mol_type = other RNA
gtctttgtactctggtaccagaagctacaaagataaggcttcatgccgaaatcaacaccctgtcattttatggcagggtgtt

SEQ ID NO: 29353 - RNA, 81 nt, synthetic construct
  source 1..81: mol_type = other RNA
gtctttgtactctggtaccagaagctacaaagataaggcttcatgccgaaatcaacaccctgtcattttatggcagggtgt

SEQ ID NO: 29354 - RNA, 80 nt, synthetic construct
  source 1..80: mol_type = other RNA
gtctttgtactctggtaccagaagctacaaagataaggcttcatgccgaaatcaacaccctgtcattttatggcagggtg

SEQ ID NO: 29355 - RNA, 79 nt, synthetic construct
  source 1..79: mol_type = other RNA
gtctttgtactctggtaccagaagctacaaagataaggcttcatgccgaaatcaacaccctgtcattttatggcagggt

SEQ ID NO: 29356 - RNA, 78 nt, synthetic construct
  source 1..78: mol_type = other RNA
gtctttgtactctggtaccagaagctacaaagataaggcttcatgccgaaatcaacaccctgtcattttatggcaggg

SEQ ID NO: 29357 - RNA, 77 nt, synthetic construct
  source 1..77: mol_type = other RNA
gtctttgtactctggtaccagaagctacaaagataaggcttcatgccgaaatcaacaccctgtcattttatggcagg

SEQ ID NO: 29358 - RNA, 76 nt, synthetic construct
  source 1..76: mol_type = other RNA
gtctttgtactctggtaccagaagctacaaagataaggcttcatgccgaaatcaacaccctgtcattttatggcag

SEQ ID NO: 29359 - RNA, 55 nt, synthetic construct
  source 1..55: mol_type = other RNA
gtctttgtactctggtaccagaagctacaaagataaggcttcatgccgaaatcaa

SEQ ID NO: 29360 - RNA, 53 nt, synthetic construct
  source 1..53: mol_type = other RNA
gtctttgtactctggtaccagaagctacaaagataaggcttcatgccgaaatc

SEQ ID NO: 29361 - RNA, 52 nt, synthetic construct
  source 1..52: mol_type = other RNA
gtctttgtactctggtaccagaagctacaaagataaggcttcatgccgaaat

SEQ ID NO: 29362 - RNA, 51 nt, synthetic construct
  source 1..51: mol_type = other RNA
gtctttgtactctggtaccagaagctacaaagataaggcttcatgccgaaa

SEQ ID NO: 29363 - RNA, 50 nt, synthetic construct
  source 1..50: mol_type = other RNA
gtctttgtactctggtaccagaagctacaaagataaggcttcatgccgaa

SEQ ID NO: 29364 - RNA, 82 nt, synthetic construct
  source 1..82: mol_type = other RNA
gtctttgtactctggtaccagaagctacaaagataaggcttcatgccgaaatcaacaccctgtcttttaggcagggtgtttt

SEQ ID NO: 29365 - RNA, 80 nt, synthetic construct
  source 1..80: mol_type = other RNA
gtctttgtactctggtaccagaagctacaaagataaggcttcatgccgaaatcaacaccctgtttttagcagggtgtttt

SEQ ID NO: 29366 - RNA, 78 nt, synthetic construct
  source 1..78: mol_type = other RNA
gtctttgtactctggtaccagaagctacaaagataaggcttcatgccgaaatcaacaccctgttttacagggtgtttt

SEQ ID NO: 29367 - RNA, 76 nt, synthetic construct
  source 1..76: mol_type = other RNA
gtctttgtactctggtaccagaagctacaaagataaggcttcatgccgaaatcaacaccctttttaagggtgtttt

SEQ ID NO: 29368 - RNA, 74 nt, synthetic construct
  source 1..74: mol_type = other RNA
gtctttgtactctggtaccagaagctacaaagataaggcttcatgccgaaatcaacacccttttagggtgtttt

SEQ ID NO: 29369 - RNA, 72 nt, synthetic construct
  source 1..72: mol_type = other RNA
gtctttgtactctggtaccagaagctacaaagataaggcttcatgccgaaatcaacaccttttaggtgtttt

SEQ ID NO: 29370 - RNA, 70 nt, synthetic construct
  source 1..70: mol_type = other RNA
gtctttgtactctggtaccagaagctacaaagataaggcttcatgccgaaatcaacacttttagtgtttt

SEQ ID NO: 29371 - RNA, 68 nt, synthetic construct
  source 1..68: mol_type = other RNA
gtctttgtactctggtaccagaagctacaaagataaggcttcatgccgaaatcaacattttatgtttt

SEQ ID NO: 29372 - RNA, 66 nt, synthetic construct
  source 1..66: mol_type = other RNA
gtctttgtactctggtaccagaagctacaaagataaggcttcatgccgaaatcaacttttagtttt

SEQ ID NO: 29373 - RNA, 64 nt, synthetic construct
  source 1..64: mol_type = other RNA
gtctttgtactctggtaccagaagctacaaagataaggcttcatgccgaaatcaattttatttt

SEQ ID NO: 29374 - RNA, 54 nt, synthetic construct
  source 1..54: mol_type = other RNA
gtctttgtactctggaaacagaagctacaaagataaggcttcatgccgaaatca

SEQ ID NO: 29375 - RNA, 53 nt, synthetic construct
  source 1..53: mol_type = other RNA
gtctttgtactctggtaccagagctacaaagataaggcttcatgccgaaatca

SEQ ID NO: 29376 - RNA, 52 nt, synthetic construct
  source 1..52: mol_type = other RNA
gtctttgtacctggtaccagagctacaaagataaggcttcatgccgaaatca

SEQ ID NO: 29377 - RNA, 51 nt, synthetic construct
  source 1..51: mol_type = other RNA
gtctttgtacctggtaccaggctacaaagataaggcttcatgccgaaatca

SEQ ID NO: 29378 - RNA, 52 nt, synthetic construct
  source 1..52: mol_type = other RNA
gtctttgtacttggtaccaaagctacaaagataaggcttcatgccgaaatca

SEQ ID NO: 29379 - RNA, 51 nt, synthetic construct
  source 1..51: mol_type = other RNA
gtctttgtacttggtaccaagctacaaagataaggcttcatgccgaaatca

SEQ ID NO: 29380 - RNA, 52 nt, synthetic construct
  source 1..52: mol_type = other RNA
gtctttgtactcggtaccgaagctacaaagataaggcttcatgccgaaatca

SEQ ID NO: 29381 - RNA, 52 nt, synthetic construct
  source 1..52: mol_type = other RNA
gtctttgtactctgtacagaagctacaaagataaggcttcatgccgaaatca

SEQ ID NO: 29382 - RNA, 49 nt, synthetic construct
  source 1..49: mol_type = other RNA
gtctttgtactggtaccagctacaaagataaggcttcatgccgaaatca

SEQ ID NO: 29383 - RNA, 50 nt, synthetic construct
  source 1..50: mol_type = other RNA
gtctttgtactggtaccaagctacaaagataaggcttcatgccgaaatca

SEQ ID NO: 29384 - RNA, 50 nt, synthetic construct
  source 1..50: mol_type = other RNA
gtctttgtactcgtacgaagctacaaagataaggcttcatgccgaaatca

SEQ ID NO: 29385 - RNA, 47 nt, synthetic construct
  source 1..47: mol_type = other RNA
gtctttgtacggtaccgctacaaagataaggcttcatgccgaaatca

SEQ ID NO: 29386 - RNA, 48 nt, synthetic construct
  source 1..48: mol_type = other RNA
gtctttgtactgtacaagctacaaagataaggcttcatgccgaaatca

SEQ ID NO: 29387 - RNA, 47 nt, synthetic construct
  source 1..47: mol_type = other RNA
gtctttgtactgtacagctacaaagataaggcttcatgccgaaatca

SEQ ID NO: 29388 - RNA, 45 nt, synthetic construct
  source 1..45: mol_type = other RNA
gtctttgtacgtacgctacaaagataaggcttcatgccgaaatca

SEQ ID NO: 29389 - RNA, 54 nt, synthetic construct
  source 1..54: mol_type = other RNA
gtctttgtactctgaatacagaagctacaaagataaggcttcatgccgaaatca

SEQ ID NO: 29390 - RNA, 54 nt, synthetic construct
  source 1..54: mol_type = other RNA
gtctttgtactctgagtacagaagctacaaagataaggcttcatgccgaaatca

SEQ ID NO: 29391 - RNA, 54 nt, synthetic construct
  source 1..54: mol_type = other RNA
gtctttgtactctgactacagaagctacaaagataaggcttcatgccgaaatca

SEQ ID NO: 29392 - RNA, 54 nt, synthetic construct
  source 1..54: mol_type = other RNA
gtctttgtactctgattacagaagctacaaagataaggcttcatgccgaaatca

SEQ ID NO: 29393 - RNA, 54 nt, synthetic construct
  source 1..54: mol_type = other RNA
gtctttgtactctgaacacagaagctacaaagataaggcttcatgccgaaatca

SEQ ID NO: 29394 - RNA, 54 nt, synthetic construct
  source 1..54: mol_type = other RNA
gtctttgtactctgagcacagaagctacaaagataaggcttcatgccgaaatca

SEQ ID NO: 29395 - RNA, 54 nt, synthetic construct
  source 1..54: mol_type = other RNA
gtctttgtactctgaccacagaagctacaaagataaggcttcatgccgaaatca

SEQ ID NO: 29396 - RNA, 54 nt, synthetic construct
  source 1..54: mol_type = other RNA
gtctttgtactctgatcacagaagctacaaagataaggcttcatgccgaaatca

SEQ ID NO: 29397 - RNA, 54 nt, synthetic construct
  source 1..54: mol_type = other RNA
gtctttgtactctgcttgcagaagctacaaagataaggcttcatgccgaaatca

SEQ ID NO: 29398 - RNA, 54 nt, synthetic construct
  source 1..54: mol_type = other RNA
gtctttgtactctgctcgcagaagctacaaagataaggcttcatgccgaaatca

SEQ ID NO: 29399 - RNA, 54 nt, synthetic construct
  source 1..54: mol_type = other RNA
gtctttgtactctgggaacagaagctacaaagataaggcttcatgccgaaatca

SEQ ID NO: 29400 - RNA, 54 nt, synthetic construct
  source 1..54: mol_type = other RNA
gtctttgtactctggcaacagaagctacaaagataaggcttcatgccgaaatca

SEQ ID NO: 29401 - RNA, 54 nt, synthetic construct
  source 1..54: mol_type = other RNA
gtctttgtactctggtaacagaagctacaaagataaggcttcatgccgaaatca

SEQ ID NO: 29402 - RNA, 54 nt, synthetic construct
  source 1..54: mol_type = other RNA
gtctttgtactctggagacagaagctacaaagataaggcttcatgccgaaatca

SEQ ID NO: 29403 - RNA, 54 nt, synthetic construct
  source 1..54: mol_type = other RNA
gtctttgtactctggggacagaagctacaaagataaggcttcatgccgaaatca

SEQ ID NO: 29404 - RNA, 54 nt, synthetic construct
  source 1..54: mol_type = other RNA
gtctttgtactctggcgacagaagctacaaagataaggcttcatgccgaaatca

SEQ ID NO: 29405 - RNA, 54 nt, synthetic construct
  source 1..54: mol_type = other RNA
gtctttgtactctggtgacagaagctacaaagataaggcttcatgccgaaatca

SEQ ID NO: 29406 - RNA, 54 nt, synthetic construct
  source 1..54: mol_type = other RNA
gtctttgtactctgtaaccagaagctacaaagataaggcttcatgccgaaatca

SEQ ID NO: 29407 - RNA, 54 nt, synthetic construct
  source 1..54: mol_type = other RNA
gtctttgtactctgtgaccagaagctacaaagataaggcttcatgccgaaatca

SEQ ID NO: 29408 - RNA, 54 nt, synthetic construct
  source 1..54: mol_type = other RNA
gtctttgtactctgtcaccagaagctacaaagataaggcttcatgccgaaatca

SEQ ID NO: 29409 - RNA, 54 nt, synthetic construct
  source 1..54: mol_type = other RNA
gtctttgtactctgttaccagaagctacaaagataaggcttcatgccgaaatca

SEQ ID NO: 29410 - RNA, 54 nt, synthetic construct
  source 1..54: mol_type = other RNA
gtctttgtactctgtacgcagaagctacaaagataaggcttcatgccgaaatca

SEQ ID NO: 29411 - RNA, 54 nt, synthetic construct
  source 1..54: mol_type = other RNA
gtctttgtactctgtgcgcagaagctacaaagataaggcttcatgccgaaatca

SEQ ID NO: 29412 - RNA, 54 nt, synthetic construct
  source 1..54: mol_type = other RNA
gtctttgtactctgtccgcagaagctacaaagataaggcttcatgccgaaatca

SEQ ID NO: 29413 - RNA, 54 nt, synthetic construct
  source 1..54: mol_type = other RNA
gtctttgtactctgttcgcagaagctacaaagataaggcttcatgccgaaatca

SEQ ID NO: 29414 - RNA, 54 nt, synthetic construct
  source 1..54: mol_type = other RNA
gtctttgtactctgggagcagaagctacaaagataaggcttcatgccgaaatca

SEQ ID NO: 29415 - RNA, 54 nt, synthetic construct
  source 1..54: mol_type = other RNA
gtctttgtactctgtgaacagaagctacaaagataaggcttcatgccgaaatca

SEQ ID NO: 29416 - RNA, 54 nt, synthetic construct
  source 1..54: mol_type = other RNA
gtctttgtactctgcaaccagaagctacaaagataaggcttcatgccgaaatca

SEQ ID NO: 29417 - RNA, 55 nt, synthetic construct
  source 1..55: mol_type = other RNA
gtctttgtactctggacaacagaagctacaaagataaggcttcatgccgaaatca

SEQ ID NO: 29418 - RNA, 55 nt, synthetic construct
  source 1..55: mol_type = other RNA
gtctttgtactctggaagacagaagctacaaagataaggcttcatgccgaaatca

SEQ ID NO: 29419 - RNA, 56 nt, synthetic construct
  source 1..56: mol_type = other RNA
gtctttgtactctcggtaccgagaagctacaaagataaggcttcatgccgaaatca

SEQ ID NO: 29420 - RNA, 58 nt, synthetic construct
  source 1..58: mol_type = other RNA
gtctttgtactctgcggtaccgcagaagctacaaagataaggcttcatgccgaaatca

SEQ ID NO: 29421 - RNA, 60 nt, synthetic construct
  source 1..60: mol_type = other RNA
gtctttgtactctcgcggtaccgcgagaagctacaaagataaggcttcatgccgaaatca

SEQ ID NO: 29422 - RNA, 62 nt, synthetic construct
  source 1..62: mol_type = other RNA
gtctttgtactctgcgcggtaccgcgcagaagctacaaagataaggcttcatgccgaaatca

SEQ ID NO: 29423 - RNA, 64 nt, synthetic construct
  source 1..64: mol_type = other RNA
gtctttgtactctcgcgcggtaccgcgcgagaagctacaaagataaggcttcatgccgaaatca

SEQ ID NO: 29424 - RNA, 62 nt, synthetic construct
  source 1..62: mol_type = other RNA
gtctttgtactctgggacttcggtcccagaagctacaaagataaggcttcatgccgaaatca

SEQ ID NO: 29425 - RNA, 60 nt, synthetic construct
  source 1..60: mol_type = other RNA
gtctttgtactctggacttcggtccagaagctacaaagataaggcttcatgccgaaatca

SEQ ID NO: 29426 - RNA, 58 nt, synthetic construct
  source 1..58: mol_type = other RNA
gtctttgtactcggacttcggtccgaagctacaaagataaggcttcatgccgaaatca

SEQ ID NO: 29427 - RNA, 66 nt, synthetic construct
  source 1..66: mol_type = other RNA
gtctttgtactctgcgcgcggtaccgcgcgcagaagctacaaagataaggcttcatgccgaaatca

SEQ ID NO: 29428 - RNA, 68 nt, synthetic construct
  source 1..68: mol_type = other RNA
gtctttgtactctcgcgcgcggtaccgcgcgcgagaagctacaaagataaggcttcatgccgaaatca

SEQ ID NO: 29429 - RNA, 62 nt, synthetic construct
  source 1..62: mol_type = other RNA
gtctttgtactctgcgcgaatacgcgcagaagctacaaagataaggcttcatgccgaaatca

SEQ ID NO: 29430 - RNA, 62 nt, synthetic construct
  source 1..62: mol_type = other RNA
gtctttgtactctgcgcgagtacgcgcagaagctacaaagataaggcttcatgccgaaatca

SEQ ID NO: 29431 - RNA, 62 nt, synthetic construct
  source 1..62: mol_type = other RNA
gtctttgtactctgcgcgactacgcgcagaagctacaaagataaggcttcatgccgaaatca

SEQ ID NO: 29432 - RNA, 62 nt, synthetic construct
  source 1..62: mol_type = other RNA
gtctttgtactctgcgcgattacgcgcagaagctacaaagataaggcttcatgccgaaatca

SEQ ID NO: 29433 - RNA, 62 nt, synthetic construct
  source 1..62: mol_type = other RNA
gtctttgtactctgcgcgaacacgcgcagaagctacaaagataaggcttcatgccgaaatca

SEQ ID NO: 29434 - RNA, 62 nt, synthetic construct
  source 1..62: mol_type = other RNA
gtctttgtactctgcgcgagcacgcgcagaagctacaaagataaggcttcatgccgaaatca

SEQ ID NO: 29435 - RNA, 62 nt, synthetic construct
  source 1..62: mol_type = other RNA
gtctttgtactctgcgcgaccacgcgcagaagctacaaagataaggcttcatgccgaaatca

SEQ ID NO: 29436 - RNA, 62 nt, synthetic construct
  source 1..62: mol_type = other RNA
gtctttgtactctgcgcgatcacgcgcagaagctacaaagataaggcttcatgccgaaatca

SEQ ID NO: 29437 - RNA, 62 nt, synthetic construct
  source 1..62: mol_type = other RNA
gtctttgtactctgcgcgcttgcgcgcagaagctacaaagataaggcttcatgccgaaatca

SEQ ID NO: 29438 - RNA, 62 nt, synthetic construct
  source 1..62: mol_type = other RNA
gtctttgtactctgcgcgctcgcgcgcagaagctacaaagataaggcttcatgccgaaatca

SEQ ID NO: 29439 - RNA, 62 nt, synthetic construct
  source 1..62: mol_type = other RNA
gtctttgtactctgcgcggaaacgcgcagaagctacaaagataaggcttcatgccgaaatca

SEQ ID NO: 29440 - RNA, 62 nt, synthetic construct
  source 1..62: mol_type = other RNA
gtctttgtactctgcgcgggaacgcgcagaagctacaaagataaggcttcatgccgaaatca

SEQ ID NO: 29441 - RNA, 62 nt, synthetic construct
  source 1..62: mol_type = other RNA
gtctttgtactctgcgcggcaacgcgcagaagctacaaagataaggcttcatgccgaaatca

SEQ ID NO: 29442 - RNA, 62 nt, synthetic construct
  source 1..62: mol_type = other RNA
gtctttgtactctgcgcggtaacgcgcagaagctacaaagataaggcttcatgccgaaatca

SEQ ID NO: 29443 - RNA, 62 nt, synthetic construct
  source 1..62: mol_type = other RNA
gtctttgtactctgcgcggagacgcgcagaagctacaaagataaggcttcatgccgaaatca

SEQ ID NO: 29444 - RNA, 62 nt, synthetic construct
  source 1..62: mol_type = other RNA
gtctttgtactctgcgcggggacgcgcagaagctacaaagataaggcttcatgccgaaatca

SEQ ID NO: 29445 - RNA, 62 nt, synthetic construct
  source 1..62: mol_type = other RNA
gtctttgtactctgcgcggcgacgcgcagaagctacaaagataaggcttcatgccgaaatca

SEQ ID NO: 29446 - RNA, 62 nt, synthetic construct
  source 1..62: mol_type = other RNA
gtctttgtactctgcgcggtgacgcgcagaagctacaaagataaggcttcatgccgaaatca

SEQ ID NO: 29447 - RNA, 62 nt, synthetic construct
  source 1..62: mol_type = other RNA
gtctttgtactctgcgcgtaaccgcgcagaagctacaaagataaggcttcatgccgaaatca

SEQ ID NO: 29448 - RNA, 62 nt, synthetic construct
  source 1..62: mol_type = other RNA
gtctttgtactctgcgcgtgaccgcgcagaagctacaaagataaggcttcatgccgaaatca

SEQ ID NO: 29449 - RNA, 62 nt, synthetic construct
  source 1..62: mol_type = other RNA
gtctttgtactctgcgcgtcaccgcgcagaagctacaaagataaggcttcatgccgaaatca

SEQ ID NO: 29450 - RNA, 62 nt, synthetic construct
  source 1..62: mol_type = other RNA
gtctttgtactctgcgcgttaccgcgcagaagctacaaagataaggcttcatgccgaaatca

SEQ ID NO: 29451 - RNA, 62 nt, synthetic construct
  source 1..62: mol_type = other RNA
gtctttgtactctgcgcgtacgcgcgcagaagctacaaagataaggcttcatgccgaaatca

SEQ ID NO: 29452 - RNA, 62 nt, synthetic construct
  source 1..62: mol_type = other RNA
gtctttgtactctgcgcgtgcgcgcgcagaagctacaaagataaggcttcatgccgaaatca

SEQ ID NO: 29453 - RNA, 62 nt, synthetic construct
  source 1..62: mol_type = other RNA
gtctttgtactctgcgcgtccgcgcgcagaagctacaaagataaggcttcatgccgaaatca

SEQ ID NO: 29454 - RNA, 62 nt, synthetic construct
  source 1..62: mol_type = other RNA
gtctttgtactctgcgcgttcgcgcgcagaagctacaaagataaggcttcatgccgaaatca

SEQ ID NO: 29455 - RNA, 62 nt, synthetic construct
  source 1..62: mol_type = other RNA
gtctttgtactctgcgcgggagcgcgcagaagctacaaagataaggcttcatgccgaaatca

SEQ ID NO: 29456 - RNA, 62 nt, synthetic construct
  source 1..62: mol_type = other RNA
gtctttgtactctgcgcgtgaacgcgcagaagctacaaagataaggcttcatgccgaaatca

SEQ ID NO: 29457 - RNA, 62 nt, synthetic construct
  source 1..62: mol_type = other RNA
gtctttgtactctgcgcgcaaccgcgcagaagctacaaagataaggcttcatgccgaaatca

SEQ ID NO: 29458 - RNA, 63 nt, synthetic construct
  source 1..63: mol_type = other RNA
gtctttgtactctgcgcggacaacgcgcagaagctacaaagataaggcttcatgccgaaatca

SEQ ID NO: 29459 - RNA, 63 nt, synthetic construct
  source 1..63: mol_type = other RNA
gtctttgtactctgcgcggaagacgcgcagaagctacaaagataaggcttcatgccgaaatca

SEQ ID NO: 29460 - RNA, 84 nt, synthetic construct; identical to SEQ ID NO: 25999
  source 1..84: mol_type = other RNA

SEQ ID NO: 29461 - RNA, 80 nt, synthetic construct
  source 1..80: mol_type = other RNA
gtctttgtactctggtaccagaagctacaaagataaggcttcatgccgaaatcaacaccctgtctatggcagggtgtttt

SEQ ID NO: 29462 - RNA, 84 nt, synthetic construct
  source 1..84: mol_type = other RNA
gtctttgtactctggaaacagaagctacaaagataaggcttcatgccgaaatcaacaccctgtcattttatggcagggtgtttt

SEQ ID NO: 29463 - RNA, 80 nt, synthetic construct
  source 1..80: mol_type = other RNA
gtttttgtactcgaaagaagctacaaagataaggcttcatgccgaaatcaacaccctgtcattttatggcagggtgtttt

SEQ ID NO: 29464 - RNA, 50 nt, synthetic construct
  source 1..50: mol_type = other RNA
gtttttgtactcgaaagaagctacaaagataaggcttcatgccgaaatca

SEQ ID NO: 29465 - RNA, 83 nt, synthetic construct
  source 1..83: mol_type = other RNA
gtctttgtactctggtaccagagctacaaagataaggcttcatgccgaaatcaacaccctgtcattttatggcagggtgtttt

SEQ ID NO: 29466 - RNA, 82 nt, synthetic construct
  source 1..82: mol_type = other RNA
gtctttgtacctggtaccagagctacaaagataaggcttcatgccgaaatcaacaccctgtcattttatggcagggtgtttt

SEQ ID NO: 29467 - RNA, 81 nt, synthetic construct
  source 1..81: mol_type = other RNA
gtctttgtacctggtaccaggctacaaagataaggcttcatgccgaaatcaacaccctgtcattttatggcagggtgtttt

SEQ ID NO: 29468 - RNA, 82 nt, synthetic construct
  source 1..82: mol_type = other RNA
gtctttgtacttggtaccaaagctacaaagataaggcttcatgccgaaatcaacaccctgtcattttatggcagggtgtttt

SEQ ID NO: 29469 - RNA, 81 nt, synthetic construct
  source 1..81: mol_type = other RNA
gtctttgtacttggtaccaagctacaaagataaggcttcatgccgaaatcaacaccctgtcattttatggcagggtgtttt

SEQ ID NO: 29470 - RNA, 82 nt, synthetic construct
  source 1..82: mol_type = other RNA
gtctttgtactcggtaccgaagctacaaagataaggcttcatgccgaaatcaacaccctgtcattttatggcagggtgtttt

SEQ ID NO: 29471 - RNA, 82 nt, synthetic construct
  source 1..82: mol_type = other RNA
gtctttgtactctgtacagaagctacaaagataaggcttcatgccgaaatcaacaccctgtcattttatggcagggtgtttt

SEQ ID NO: 29472 - RNA, 79 nt, synthetic construct
  source 1..79: mol_type = other RNA
gtctttgtactggtaccagctacaaagataaggcttcatgccgaaatcaacaccctgtcattttatggcagggtgtttt

SEQ ID NO: 29473 - RNA, 80 nt, synthetic construct
  source 1..80: mol_type = other RNA
gtctttgtactggtaccaagctacaaagataaggcttcatgccgaaatcaacaccctgtcattttatggcagggtgtttt

SEQ ID NO: 29474 - RNA, 79 nt, synthetic construct; identical to SEQ ID NO: 29472
  source 1..79: mol_type = other RNA

SEQ ID NO: 29475 - RNA, 80 nt, synthetic construct
  source 1..80: mol_type = other RNA
gtctttgtactcgtacgaagctacaaagataaggcttcatgccgaaatcaacaccctgtcattttatggcagggtgtttt

SEQ ID NO: 29476 - RNA, 77 nt, synthetic construct
  source 1..77: mol_type = other RNA
gtctttgtacggtaccgctacaaagataaggcttcatgccgaaatcaacaccctgtcattttatggcagggtgtttt

SEQ ID NO: 29477 - RNA, 78 nt, synthetic construct
  source 1..78: mol_type = other RNA
gtctttgtactgtacaagctacaaagataaggcttcatgccgaaatcaacaccctgtcattttatggcagggtgtttt

SEQ ID NO: 29478 - RNA, 77 nt, synthetic construct
  source 1..77: mol_type = other RNA
gtctttgtactgtacagctacaaagataaggcttcatgccgaaatcaacaccctgtcattttatggcagggtgtttt

SEQ ID NO: 29479 - RNA, 75 nt, synthetic construct
  source 1..75: mol_type = other RNA
gtctttgtacgtacgctacaaagataaggcttcatgccgaaatcaacaccctgtcattttatggcagggtgtttt

SEQ ID NO: 29480 - RNA, 83 nt, synthetic construct
  source 1..83: mol_type = other RNA
gtctttgtactctggtaccagaagctacaaagataaggcttcatgccgaaatcaacaccctgtcattttatggcagggtgttt

SEQ ID NO: 29481-29485 - skipped (5 entries)

SEQ ID NO: 29486 - RNA, 10 nt, synthetic construct
  source 1..10: mol_type = other RNA
tttctcgtcg

SEQ ID NO: 29487 - RNA, 11 nt, synthetic construct
  source 1..11: mol_type = other RNA
ctttctcgtcg

SEQ ID NO: 29488 - RNA, 12 nt, synthetic construct
  source 1..12: mol_type = other RNA
cctttctcgtcg

SEQ ID NO: 29489 - RNA, 13 nt, synthetic construct
  source 1..13: mol_type = other RNA
ccctttctcgtcg

SEQ ID NO: 29490 - RNA, 14 nt, synthetic construct
  source 1..14: mol_type = other RNA
tccctttctcgtcg

SEQ ID NO: 29491 - RNA, 15 nt, synthetic construct
  source 1..15: mol_type = other RNA
gtccctttctcgtcg

SEQ ID NO: 29492 - RNA, 16 nt, synthetic construct
  source 1..16: mol_type = other RNA
agtccctttctcgtcg

SEQ ID NO: 29493 - RNA, 17 nt, synthetic construct
  source 1..17: mol_type = other RNA
cagtccctttctcgtcg

SEQ ID NO: 29494 - RNA, 18 nt, synthetic construct
  source 1..18: mol_type = other RNA
tcagtccctttctcgtcg

SEQ ID NO: 29495 - RNA, 19 nt, synthetic construct
  source 1..19: mol_type = other RNA
ttcagtccctttctcgtcg

SEQ ID NO: 29496 - RNA, 20 nt, synthetic construct
  source 1..20: mol_type = other RNA
cttcagtccctttctcgtcg

SEQ ID NO: 29497 - RNA, 21 nt, synthetic construct
  source 1..21: mol_type = other RNA
gcttcagtccctttctcgtcg

SEQ ID NO: 29498 - RNA, 22 nt, synthetic construct
  source 1..22: mol_type = other RNA
agcttcagtccctttctcgtcg

SEQ ID NO: 29499 - RNA, 23 nt, synthetic construct
  source 1..23: mol_type = other RNA
cagcttcagtccctttctcgtcg

SEQ ID NO: 29500 - RNA, 24 nt, synthetic construct
  source 1..24: mol_type = other RNA
gcagcttcagtccctttctcgtcg

SEQ ID NO: 29501 - RNA, 25 nt, synthetic construct
  source 1..25: mol_type = other RNA
agcagcttcagtccctttctcgtcg

SEQ ID NO: 29502 - RNA, 26 nt, synthetic construct
  source 1..26: mol_type = other RNA
cagcagcttcagtccctttctcgtcg

SEQ ID NO: 29503 - RNA, 27 nt, synthetic construct
  source 1..27: mol_type = other RNA
ccagcagcttcagtccctttctcgtcg

SEQ ID NO: 29504 - RNA, 28 nt, synthetic construct
  source 1..28: mol_type = other RNA
cccagcagcttcagtccctttctcgtcg

SEQ ID NO: 29505 - RNA, 29 nt, synthetic construct
  source 1..29: mol_type = other RNA
ccccagcagcttcagtccctttctcgtcg

SEQ ID NO: 29506 - RNA, 30 nt, synthetic construct
  source 1..30: mol_type = other RNA
gccccagcagcttcagtccctttctcgtcg

SEQ ID NO: 29507 - RNA, 31 nt, synthetic construct
  source 1..31: mol_type = other RNA
ggccccagcagcttcagtccctttctcgtcg

SEQ ID NO: 29508 - RNA, 32 nt, synthetic construct
  source 1..32: mol_type = other RNA
tggccccagcagcttcagtccctttctcgtcg

SEQ ID NO: 29509 - RNA, 33 nt, synthetic construct
  source 1..33: mol_type = other RNA
atggccccagcagcttcagtccctttctcgtcg

SEQ ID NO: 29510 - RNA, 34 nt, synthetic construct
  source 1..34: mol_type = other RNA
catggccccagcagcttcagtccctttctcgtcg

SEQ ID NO: 29511 - RNA, 35 nt, synthetic construct
  source 1..35: mol_type = other RNA
acatggccccagcagcttcagtccctttctcgtcg

SEQ ID NO: 29512 - RNA, 36 nt, synthetic construct
  source 1..36: mol_type = other RNA
aacatggccccagcagcttcagtccctttctcgtcg

SEQ ID NO: 29513 - RNA, 37 nt, synthetic construct
  source 1..37: mol_type = other RNA
aaacatggccccagcagcttcagtccctttctcgtcg

SEQ ID NO: 29514 - RNA, 38 nt, synthetic construct
  source 1..38: mol_type = other RNA
aaaacatggccccagcagcttcagtccctttctcgtcg

SEQ ID NO: 29515 - RNA, 39 nt, synthetic construct
  source 1..39: mol_type = other RNA
aaaaacatggccccagcagcttcagtccctttctcgtcg

SEQ ID NO: 29516 - RNA, 40 nt, synthetic construct
  source 1..40: mol_type = other RNA
taaaaacatggccccagcagcttcagtccctttctcgtcg

SEQ ID NO: 29517 - RNA, 41 nt, synthetic construct
  source 1..41: mol_type = other RNA
ctaaaaacatggccccagcagcttcagtccctttctcgtcg

SEQ ID NO: 29518 - RNA, 42 nt, synthetic construct
  source 1..42: mol_type = other RNA
tctaaaaacatggccccagcagcttcagtccctttctcgtcg

SEQ ID NO: 29519 - RNA, 43 nt, synthetic construct
  source 1..43: mol_type = other RNA
ctctaaaaacatggccccagcagcttcagtccctttctcgtcg

SEQ ID NO: 29520 - RNA, 44 nt, synthetic construct
  source 1..44: mol_type = other RNA
cctctaaaaacatggccccagcagcttcagtccctttctcgtcg

SEQ ID NO: 29521 - RNA, 45 nt, synthetic construct
  source 1..45: mol_type = other RNA
gcctctaaaaacatggccccagcagcttcagtccctttctcgtcg

SEQ ID NO: 29522 - RNA, 46 nt, synthetic construct
  source 1..46: mol_type = other RNA
ggcctctaaaaacatggccccagcagcttcagtccctttctcgtcg

SEQ ID NO: 29523 - RNA, 47 nt, synthetic construct
  source 1..47: mol_type = other RNA
tggcctctaaaaacatggccccagcagcttcagtccctttctcgtcg

SEQ ID NO: 29524 - RNA, 48 nt, synthetic construct
  source 1..48: mol_type = other RNA
atggcctctaaaaacatggccccagcagcttcagtccctttctcgtcg

SEQ ID NO: 29525 - RNA, 49 nt, synthetic construct
  source 1..49: mol_type = other RNA
tatggcctctaaaaacatggccccagcagcttcagtccctttctcgtcg

SEQ ID NO: 29526 - RNA, 50 nt, synthetic construct
  source 1..50: mol_type = other RNA
gtatggcctctaaaaacatggccccagcagcttcagtccctttctcgtcg

SEQ ID NO: 29527 - RNA, 51 nt, synthetic construct
  source 1..51: mol_type = other RNA
ggtatggcctctaaaaacatggccccagcagcttcagtccctttctcgtcg

SEQ ID NO: 29528 - RNA, 17 nt, synthetic construct
  source 1..17: mol_type = other RNA
atggtcagcacagcctt

SEQ ID NO: 29529 - RNA, 16 nt, synthetic construct
  source 1..16: mol_type = other RNA
atggtcagcacagcct

SEQ ID NO: 29530 - RNA, 15 nt, synthetic construct
  source 1..15: mol_type = other RNA
atggtcagcacagcc

SEQ ID NO: 29531 - RNA, 14 nt, synthetic construct
  source 1..14: mol_type = other RNA
atggtcagcacagc

SEQ ID NO: 29532 - RNA, 13 nt, synthetic construct
  source 1..13: mol_type = other RNA
atggtcagcacag

SEQ ID NO: 29533 - RNA, 12 nt, synthetic construct
  source 1..12: mol_type = other RNA
atggtcagcaca

SEQ ID NO: 29534 - RNA, 11 nt, synthetic construct
  source 1..11: mol_type = other RNA
atggtcagcac

SEQ ID NO: 29535 - RNA, 10 nt, synthetic construct
  source 1..10: mol_type = other RNA
atggtcagca

SEQ ID NO: 29536-29539 - skipped (4 entries)

SEQ ID NO: 29540 - RNA, 104 nt, synthetic construct
  source 1..104: mol_type = other RNA
  modified_base 1: mod_base = OTHER; note = 2'-O-methyl modified nucleotide with phosphorothioate linkage
  modified_base 2: mod_base = OTHER; note = 2'-O-methyl modified nucleotide with phosphorothioate linkage
  modified_base 3: mod_base = OTHER; note = 2'-O-methyl modified nucleotide with phosphorothioate linkage
  modified_base 101: mod_base = OTHER; note = Nucleotide with phosphorothioate linkage
  modified_base 102: mod_base = OTHER; note = 2'-O-methyl modified nucleotide with phosphorothioate linkage
  modified_base 103: mod_base = OTHER; note = 2'-O-methyl modified nucleotide with phosphorothioate linkage
  modified_base 104: mod_base = OTHER; note = 2'-O-methyl modified nucleotide
ttggtattttgttcaatcatgtctttgtactctggtaccagaagctacaaagataaggcttcatgccgaaatcaacaccctgtcattttatggcagggtgtttt

SEQ ID NO: 29541 - RNA, 104 nt, synthetic construct
  source 1..104: mol_type = other RNA
  modified_base 1: mod_base = OTHER; note = 2'-O-methyl modified nucleotide with phosphorothioate linkage
  modified_base 2: mod_base = OTHER; note = 2'-O-methyl modified nucleotide with phosphorothioate linkage
  modified_base 3: mod_base = OTHER; note = 2'-O-methyl modified nucleotide with phosphorothioate linkage
  modified_base 101: mod_base = OTHER; note = Nucleotide with phosphorothioate linkage
  modified_base 102: mod_base = OTHER; note = 2'-O-methyl modified nucleotide with phosphorothioate linkage
  modified_base 103: mod_base = OTHER; note = 2'-O-methyl modified nucleotide with phosphorothioate linkage
  modified_base 104: mod_base = OTHER; note = 2'-O-methyl modified nucleotide
ttatgcacggcctggagggggtctttgtactctggtaccagaagctacaaagataaggcttcatgccgaaatcaacaccctgtcattttatggcagggtgtttt

SEQ ID NO: 29542 - RNA, 104 nt, synthetic construct
  source 1..104: mol_type = other RNA
  modified_base 1: mod_base = OTHER; note = 2'-O-methyl modified nucleotide with phosphorothioate linkage
  modified_base 2: mod_base = OTHER; note = 2'-O-methyl modified nucleotide with phosphorothioate linkage
  modified_base 3: mod_base = OTHER; note = 2'-O-methyl modified nucleotide with phosphorothioate linkage
  modified_base 101: mod_base = OTHER; note = Nucleotide with phosphorothioate linkage
  modified_base 102: mod_base = OTHER; note = 2'-O-methyl modified nucleotide with phosphorothioate linkage
  modified_base 103: mod_base = OTHER; note = 2'-O-methyl modified nucleotide with phosphorothioate linkage
  modified_base 104: mod_base = OTHER; note = 2'-O-methyl modified nucleotide
aggctcacgtggacacctccgtctttgtactctggtaccagaagctacaaagataaggcttcatgccgaaatcaacaccctgtcattttatggcagggtgtttt

SEQ ID NO: 29543 - RNA, 74 nt, synthetic construct
  source 1..74: mol_type = other RNA
  modified_base 1: mod_base = OTHER; note = 2'-O-methyl modified nucleotide with phosphorothioate linkage
  modified_base 2: mod_base = OTHER; note = 2'-O-methyl modified nucleotide with phosphorothioate linkage
  modified_base 3: mod_base = OTHER; note = 2'-O-methyl modified nucleotide with phosphorothioate linkage
  modified_base 71: mod_base = OTHER; note = Nucleotide with phosphorothioate linkage
  modified_base 72: mod_base = OTHER; note = 2'-O-methyl modified nucleotide with phosphorothioate linkage
  modified_base 73: mod_base = OTHER; note = 2'-O-methyl modified nucleotide with phosphorothioate linkage
  modified_base 74: mod_base = OTHER; note = 2'-O-methyl modified nucleotide
ttggtattttgttcaatcatgtctttgtactctggtaccagaagctacaaagataaggcttcatgccgaaatca

SEQ ID NO: 29544 - RNA, 74 nt, synthetic construct
  source 1..74: mol_type = other RNA
  modified_base 1: mod_base = OTHER; note = 2'-O-methyl modified nucleotide with phosphorothioate linkage
  modified_base 2: mod_base = OTHER; note = 2'-O-methyl modified nucleotide with phosphorothioate linkage
  modified_base 3: mod_base = OTHER; note = 2'-O-methyl modified nucleotide with phosphorothioate linkage
  modified_base 71: mod_base = OTHER; note = Nucleotide with phosphorothioate linkage
  modified_base 72: mod_base = OTHER; note = 2'-O-methyl modified nucleotide with phosphorothioate linkage
  modified_base 73: mod_base = OTHER; note = 2'-O-methyl modified nucleotide with phosphorothioate linkage
  modified_base 74: mod_base = OTHER; note = 2'-O-methyl modified nucleotide
ttatgcacggcctggagggggtctttgtactctggtaccagaagctacaaagataaggcttcatgccgaaatca

SEQ ID NO: 29545 - RNA, 74 nt, synthetic construct
  source 1..74: mol_type = other RNA
  modified_base 1: mod_base = OTHER; note = 2'-O-methyl modified nucleotide with phosphorothioate linkage
  modified_base 2: mod_base = OTHER; note = 2'-O-methyl modified nucleotide with phosphorothioate linkage
  modified_base 3: mod_base = OTHER; note = 2'-O-methyl modified nucleotide with phosphorothioate linkage
  modified_base 71: mod_base = OTHER; note = Nucleotide with phosphorothioate linkage
  modified_base 72: mod_base = OTHER; note = 2'-O-methyl modified nucleotide with phosphorothioate linkage
  modified_base 73: mod_base = OTHER; note = 2'-O-methyl modified nucleotide with phosphorothioate linkage
  modified_base 74: mod_base = OTHER; note = 2'-O-methyl modified nucleotide
aggctcacgtggacacctccgtctttgtactctggtaccagaagctacaaagataaggcttcatgccgaaatca

SEQ ID NO: 29546 - RNA, 104 nt, synthetic construct
  source 1..104: mol_type = other RNA
  modified_base 1: mod_base = OTHER; note = 2'-O-methyl modified nucleotide with phosphorothioate linkage
  modified_base 2: mod_base = OTHER; note = 2'-O-methyl modified nucleotide with phosphorothioate linkage
  modified_base 3: mod_base = OTHER; note = 2'-O-methyl modified nucleotide with phosphorothioate linkage
  modified_base 101: mod_base = OTHER; note = Nucleotide with phosphorothioate linkage
  modified_base 102: mod_base = OTHER; note = 2'-O-methyl modified nucleotide with phosphorothioate linkage
  modified_base 103: mod_base = OTHER; note = 2'-O-methyl modified nucleotide with phosphorothioate linkage
  modified_base 104: mod_base = OTHER; note = 2'-O-methyl modified nucleotide
aaggctcacgtggacacctcgtctttgtactctggtaccagaagctacaaagataaggcttcatgccgaaatcaacaccctgtcattttatggcagggtgtttt

SEQ ID NO: 29547 - RNA, 74 nt, synthetic construct
  source 1..74: mol_type = other RNA
  modified_base 1: mod_base = OTHER; note = 2'-O-methyl modified nucleotide with phosphorothioate linkage
  modified_base 2: mod_base = OTHER; note = 2'-O-methyl modified nucleotide with phosphorothioate linkage
  modified_base 3: mod_base = OTHER; note = 2'-O-methyl modified nucleotide with phosphorothioate linkage
  modified_base 71: mod_base = OTHER; note = Nucleotide with phosphorothioate linkage
  modified_base 72: mod_base = OTHER; note = 2'-O-methyl modified nucleotide with phosphorothioate linkage
  modified_base 73: mod_base = OTHER; note = 2'-O-methyl modified nucleotide with phosphorothioate linkage
  modified_base 74: mod_base = OTHER; note = 2'-O-methyl modified nucleotide
aaggctcacgtggacacctcgtctttgtactctggtaccagaagctacaaagataaggcttcatgccgaaatca

SEQ ID NO: 29548 - RNA, 104 nt, synthetic construct; identical to SEQ ID NO: 29540
  source 1..104: mol_type = other RNA

SEQ ID NO: 29549 - RNA, 104 nt, synthetic construct; identical to SEQ ID NO: 29541
  source 1..104: mol_type = other RNA

SEQ ID NO: 29550 - RNA, 104 nt, synthetic construct; identical to SEQ ID NO: 29542
  source 1..104: mol_type = other RNA

SEQ ID NO: 29551 - RNA, 74 nt, synthetic construct; identical to SEQ ID NO: 29543
  source 1..74: mol_type = other RNA

SEQ ID NO: 29552 - RNA, 74 nt, synthetic construct; identical to SEQ ID NO: 29544
  source 1..74: mol_type = other RNA

SEQ ID NO: 29553 - RNA, 74 nt, synthetic construct; identical to SEQ ID NO: 29545
  source 1..74: mol_type = other RNA

SEQ ID NO: 29554 - RNA, 104 nt, synthetic construct; identical to SEQ ID NO: 29546
  source 1..104: mol_type = other RNA

SEQ ID NO: 29555 - RNA, 74 nt, synthetic construct; identical to SEQ ID NO: 29547
  source 1..74: mol_type = other RNA

SEQ ID NO: 29556 - RNA, 93 nt, synthetic construct; identical to SEQ ID NO: 28229
  source 1..93: mol_type = other RNA
  modified_base 1: mod_base = OTHER; note = 2'-O-methyl modified nucleotide with phosphorothioate linkage
  modified_base 2: mod_base = OTHER; note = 2'-O-methyl modified nucleotide with phosphorothioate linkage
  modified_base 3: mod_base = OTHER; note = 2'-O-methyl modified nucleotide with phosphorothioate linkage
  modified_base 90: mod_base = OTHER; note = Nucleotide with phosphorothioate linkage
  modified_base 91: mod_base = OTHER; note = 2'-O-methyl modified nucleotide with phosphorothioate linkage
  modified_base 92: mod_base = OTHER; note = 2'-O-methyl modified nucleotide with phosphorothioate linkage
  modified_base 93: mod_base = OTHER; note = 2'-O-methyl modified nucleotide

SEQ ID NO: 29557 - RNA, 92 nt, synthetic construct; identical to SEQ ID NO: 28230
  source 1..92: mol_type = other RNA
  modified_base 1: mod_base = OTHER; note = 2'-O-methyl modified nucleotide with phosphorothioate linkage
  modified_base 2: mod_base = OTHER; note = 2'-O-methyl modified nucleotide with phosphorothioate linkage
  modified_base 3: mod_base = OTHER; note = 2'-O-methyl modified nucleotide with phosphorothioate linkage
  modified_base 89: mod_base = OTHER; note = Nucleotide with phosphorothioate linkage
  modified_base 90: mod_base = OTHER; note = 2'-O-methyl modified nucleotide with phosphorothioate linkage
  modified_base 91: mod_base = OTHER; note = 2'-O-methyl modified nucleotide with phosphorothioate linkage
  modified_base 92: mod_base = OTHER; note = 2'-O-methyl modified nucleotide

SEQ ID NO: 29558 - RNA, 91 nt, synthetic construct; identical to SEQ ID NO: 28231
  source 1..91: mol_type = other RNA
  modified_base 1: mod_base = OTHER; note = 2'-O-methyl modified nucleotide with phosphorothioate linkage
  modified_base 2: mod_base = OTHER; note = 2'-O-methyl modified nucleotide with phosphorothioate linkage
  modified_base 3: mod_base = OTHER; note = 2'-O-methyl modified nucleotide with phosphorothioate linkage
  modified_base 88: mod_base = OTHER; note = Nucleotide with phosphorothioate linkage
  modified_base 89: mod_base = OTHER; note = 2'-O-methyl modified nucleotide with phosphorothioate linkage
  modified_base 90: mod_base = OTHER; note = 2'-O-methyl modified nucleotide with phosphorothioate linkage
  modified_base 91: mod_base = OTHER; note = 2'-O-methyl modified nucleotide

SEQ ID NO: 29559 - RNA, 90 nt, synthetic construct; identical to SEQ ID NO: 28232
  source 1..90: mol_type = other RNA
  modified_base 1: mod_base = OTHER; note = 2'-O-methyl modified nucleotide with phosphorothioate linkage
  modified_base 2: mod_base = OTHER; note = 2'-O-methyl modified nucleotide with phosphorothioate linkage
  modified_base 3: mod_base = OTHER; note = 2'-O-methyl modified nucleotide with phosphorothioate linkage
  modified_base 87: mod_base = OTHER; note = Nucleotide with phosphorothioate linkage
  modified_base 88: mod_base = OTHER; note = 2'-O-methyl modified nucleotide with phosphorothioate linkage
  modified_base 89: mod_base = OTHER; note = 2'-O-methyl modified nucleotide with phosphorothioate linkage
  modified_base 90: mod_base = OTHER; note = 2'-O-methyl modified nucleotide

SEQ ID NO: 29560 - RNA, 89 nt, synthetic construct; identical to SEQ ID NO: 28233
  source 1..89: mol_type = other RNA
  modified_base 1: mod_base = OTHER; note = 2'-O-methyl modified nucleotide with phosphorothioate linkage
  modified_base 2: mod_base = OTHER; note = 2'-O-methyl modified nucleotide with phosphorothioate linkage
  modified_base 3: mod_base = OTHER; note = 2'-O-methyl modified nucleotide with phosphorothioate linkage
  modified_base 86: mod_base = OTHER; note = Nucleotide with phosphorothioate linkage
  modified_base 87: mod_base = OTHER; note = 2'-O-methyl modified nucleotide with phosphorothioate linkage
  modified_base 88: mod_base = OTHER; note = 2'-O-methyl modified nucleotide with phosphorothioate linkage
  modified_base 89: mod_base = OTHER; note = 2'-O-methyl modified nucleotide

SEQ ID NO: 29561 - RNA, 88 nt, synthetic construct; identical to SEQ ID NO: 28234
  source 1..88: mol_type = other RNA
  modified_base 1: mod_base = OTHER; note = 2'-O-methyl modified nucleotide with phosphorothioate linkage
  modified_base 2: mod_base = OTHER; note = 2'-O-methyl modified nucleotide with phosphorothioate linkage
  modified_base 3: mod_base = OTHER; note = 2'-O-methyl modified nucleotide with phosphorothioate linkage
  modified_base 85: mod_base = OTHER; note = Nucleotide with phosphorothioate linkage
  modified_base 86: mod_base = OTHER; note = 2'-O-methyl modified nucleotide with phosphorothioate linkage
  modified_base 87: mod_base = OTHER; note = 2'-O-methyl modified nucleotide with phosphorothioate linkage
  modified_base 88: mod_base = OTHER; note = 2'-O-methyl modified nucleotide

SEQ ID NO: 29562 - RNA, 87 nt, synthetic construct; identical to SEQ ID NO: 28235
  source 1..87: mol_type = other RNA
  modified_base 1: mod_base = OTHER; note = 2'-O-methyl modified nucleotide with phosphorothioate linkage
  modified_base 2: mod_base = OTHER; note = 2'-O-methyl modified nucleotide with phosphorothioate linkage
  modified_base 3: mod_base = OTHER; note = 2'-O-methyl modified nucleotide with phosphorothioate linkage
  modified_base 84: mod_base = OTHER; note = Nucleotide with phosphorothioate linkage
  modified_base 85: mod_base = OTHER; note = 2'-O-methyl modified nucleotide with phosphorothioate linkage
  modified_base 86: mod_base = OTHER; note = 2'-O-methyl modified nucleotide with phosphorothioate linkage
  modified_base 87: mod_base = OTHER; note = 2'-O-methyl modified nucleotide

SEQ ID NO: 29563 - RNA, 94 nt, synthetic construct; identical to SEQ ID NO: 28241
  source 1..94: mol_type = other RNA
  modified_base 1: mod_base = OTHER; note = 2'-O-methyl modified nucleotide with phosphorothioate linkage
  modified_base 2: mod_base = OTHER; note = 2'-O-methyl modified nucleotide with phosphorothioate linkage
  modified_base 3: mod_base = OTHER; note = 2'-O-methyl modified nucleotide with phosphorothioate linkage
  modified_base 91: mod_base = OTHER; note = Nucleotide with phosphorothioate linkage
  modified_base 92: mod_base = OTHER; note = 2'-O-methyl modified nucleotide with phosphorothioate linkage
  modified_base 93: mod_base = OTHER; note = 2'-O-methyl modified nucleotide with phosphorothioate linkage
  modified_base 94: mod_base = OTHER; note = 2'-O-methyl modified nucleotide

SEQ ID NO: 29564 - RNA, 93 nt, synthetic construct; identical to SEQ ID NO: 27145
  source 1..93: mol_type = other RNA
  modified_base 1: mod_base = OTHER; note = 2'-O-methyl modified nucleotide with phosphorothioate linkage
  modified_base 2: mod_base = OTHER; note = 2'-O-methyl modified nucleotide with phosphorothioate linkage
  modified_base 3: mod_base = OTHER; note = 2'-O-methyl modified nucleotide with phosphorothioate linkage
  modified_base 90: mod_base = OTHER; note = Nucleotide with phosphorothioate linkage
  modified_base 91: mod_base = OTHER; note = 2'-O-methyl modified nucleotide with phosphorothioate linkage
  modified_base 92: mod_base = OTHER; note = 2'-O-methyl modified nucleotide with phosphorothioate linkage
  modified_base 93: mod_base = OTHER; note = 2'-O-methyl modified nucleotide

SEQ ID NO: 29565 - RNA, 92 nt, synthetic construct; identical to SEQ ID NO: 27146
  source 1..92: mol_type = other RNA
  modified_base 1: mod_base = OTHER; note = 2'-O-methyl modified nucleotide with phosphorothioate linkage
  modified_base 2: mod_base = OTHER; note = 2'-O-methyl modified nucleotide with phosphorothioate linkage
  modified_base 3: mod_base = OTHER; note = 2'-O-methyl modified nucleotide with phosphorothioate linkage
  modified_base 89: mod_base = OTHER; note = Nucleotide with phosphorothioate linkage
  modified_base 90: mod_base = OTHER; note = 2'-O-methyl modified nucleotide with phosphorothioate linkage
  modified_base 91: mod_base = OTHER; note = 2'-O-methyl modified nucleotide with phosphorothioate linkage
  modified_base 92: mod_base = OTHER; note = 2'-O-methyl modified nucleotide

SEQ ID NO: 29566 - RNA, 91 nt, synthetic construct; identical to SEQ ID NO: 27147
  source 1..91: mol_type = other RNA
  modified_base 1: mod_base = OTHER; note = 2'-O-methyl modified nucleotide with phosphorothioate linkage
  modified_base 2: mod_base = OTHER; note = 2'-O-methyl modified nucleotide with phosphorothioate linkage
  modified_base 3: mod_base = OTHER; note = 2'-O-methyl modified nucleotide with phosphorothioate linkage
  modified_base 88: mod_base = OTHER; note = Nucleotide with phosphorothioate linkage
  modified_base 89: mod_base = OTHER; note = 2'-O-methyl modified nucleotide with phosphorothioate linkage
  modified_base 90: mod_base = OTHER; note = 2'-O-methyl modified nucleotide with phosphorothioate linkage
  modified_base 91: mod_base = OTHER; note = 2'-O-methyl modified nucleotide

SEQ ID NO: 29567 - RNA, 90 nt, synthetic construct; identical to SEQ ID NO: 27148
  source 1..90: mol_type = other RNA
  modified_base 1: mod_base = OTHER; note = 2'-O-methyl modified nucleotide with phosphorothioate linkage
  modified_base 2: mod_base = OTHER; note = 2'-O-methyl modified nucleotide with phosphorothioate linkage
  modified_base 3: mod_base = OTHER; note = 2'-O-methyl modified nucleotide with phosphorothioate linkage
  modified_base 87: mod_base = OTHER; note = Nucleotide with phosphorothioate linkage
  modified_base 88: mod_base = OTHER; note = 2'-O-methyl modified nucleotide with phosphorothioate linkage
  modified_base 89: mod_base = OTHER; note = 2'-O-methyl modified nucleotide with phosphorothioate linkage
  modified_base 90: mod_base = OTHER; note = 2'-O-methyl modified nucleotide

SEQ ID NO: 29568 - RNA, 89 nt, synthetic construct; identical to SEQ ID NO: 27149
  source 1..89: mol_type = other RNA
  modified_base 1: mod_base = OTHER; note = 2'-O-methyl modified nucleotide with phosphorothioate linkage
  modified_base 2: mod_base = OTHER; note = 2'-O-methyl modified nucleotide with phosphorothioate linkage
  modified_base 3: mod_base = OTHER; note = 2'-O-methyl modified nucleotide with phosphorothioate linkage
  modified_base 86: mod_base = OTHER; note = Nucleotide with phosphorothioate linkage
  modified_base 87: mod_base = OTHER; note = 2'-O-methyl modified nucleotide with phosphorothioate linkage
  modified_base 88: mod_base = OTHER; note = 2'-O-methyl modified nucleotide with phosphorothioate linkage
  modified_base 89: mod_base = OTHER; note = 2'-O-methyl modified nucleotide

SEQ ID NO: 29569 - RNA, 88 nt, synthetic construct; identical to SEQ ID NO: 27150
  source 1..88: mol_type = other RNA
  modified_base 1: mod_base = OTHER; note = 2'-O-methyl modified nucleotide with phosphorothioate linkage
  modified_base 2: mod_base = OTHER; note = 2'-O-methyl modified nucleotide with phosphorothioate linkage
  modified_base 3: mod_base = OTHER; note = 2'-O-methyl modified nucleotide with phosphorothioate linkage
  modified_base 85: mod_base = OTHER; note = Nucleotide with phosphorothioate linkage
  modified_base 86: mod_base = OTHER; note = 2'-O-methyl modified nucleotide with phosphorothioate linkage
  modified_base 87: mod_base = OTHER; note = 2'-O-methyl modified nucleotide with phosphorothioate linkage
  modified_base 88: mod_base = OTHER; note = 2'-O-methyl modified nucleotide

SEQ ID NO: 29570 - RNA, 95 nt, synthetic construct; identical to SEQ ID NO: 27151
  source 1..95: mol_type = other RNA
  modified_base 1: mod_base = OTHER; note = 2'-O-methyl modified nucleotide with phosphorothioate linkage
  modified_base 2: mod_base = OTHER; note = 2'-O-methyl modified nucleotide with phosphorothioate linkage
  modified_base 3: mod_base = OTHER; note = 2'-O-methyl modified nucleotide with phosphorothioate linkage
  modified_base 92: mod_base = OTHER; note = Nucleotide with phosphorothioate linkage
  modified_base 93: mod_base = OTHER; note = 2'-O-methyl modified nucleotide with phosphorothioate linkage
  modified_base 94: mod_base = OTHER; note = 2'-O-methyl modified nucleotide with phosphorothioate linkage
  modified_base 95: mod_base = OTHER; note = 2'-O-methyl modified nucleotide

SEQ ID NO: 29571 - RNA, 94 nt, synthetic construct; identical to SEQ ID NO: 27152
  source 1..94: mol_type = other RNA
  modified_base 1: mod_base = OTHER; note = 2'-O-methyl modified nucleotide with phosphorothioate linkage
  modified_base 2: mod_base = OTHER; note = 2'-O-methyl modified nucleotide with phosphorothioate linkage
  modified_base 3: mod_base = OTHER; note = 2'-O-methyl modified nucleotide with phosphorothioate linkage
  modified_base 91: mod_base = OTHER; note = Nucleotide with phosphorothioate linkage
  modified_base 92: mod_base = OTHER; note = 2'-O-methyl modified nucleotide with phosphorothioate linkage
  modified_base 93: mod_base = OTHER; note = 2'-O-methyl modified nucleotide with phosphorothioate linkage
  modified_base 94: mod_base = OTHER; note = 2'-O-methyl modified nucleotide

SEQ ID NO: 29572 - RNA, 93 nt, synthetic construct; identical to SEQ ID NO: 27153
  source 1..93: mol_type = other RNA
  modified_base 1: mod_base = OTHER; note = 2'-O-methyl modified nucleotide with phosphorothioate linkage
  modified_base 2: mod_base = OTHER; note = 2'-O-methyl modified nucleotide with phosphorothioate linkage
  modified_base 3: mod_base = OTHER; note = 2'-O-methyl modified nucleotide with phosphorothioate linkage
  modified_base 90: mod_base = OTHER; note = Nucleotide with phosphorothioate linkage
  modified_base 91: mod_base = OTHER; note = 2'-O-methyl modified nucleotide with phosphorothioate linkage
  modified_base 92: mod_base = OTHER; note = 2'-O-methyl modified nucleotide with phosphorothioate linkage
  modified_base 93: mod_base = OTHER; note = 2'-O-methyl modified nucleotide

SEQ ID NO: 29573 - RNA, 92 nt, synthetic construct; identical to SEQ ID NO: 27154
  source 1..92: mol_type = other RNA
  modified_base 1: mod_base = OTHER; note = 2'-O-methyl modified nucleotide with phosphorothioate linkage
  modified_base 2: mod_base = OTHER; note = 2'-O-methyl modified nucleotide with phosphorothioate linkage
  modified_base 3: mod_base = OTHER; note = 2'-O-methyl modified nucleotide with phosphorothioate linkage
  modified_base 89: mod_base = OTHER; note = Nucleotide with phosphorothioate linkage
  modified_base 90: mod_base = OTHER; note = 2'-O-methyl modified nucleotide with phosphorothioate linkage
  modified_base 91: mod_base = OTHER; note = 2'-O-methyl modified nucleotide with phosphorothioate linkage
  modified_base 92: mod_base = OTHER; note = 2'-O-methyl modified nucleotide

SEQ ID NO: 29574 - RNA, 91 nt, synthetic construct; identical to SEQ ID NO: 27155
  source 1..91: mol_type = other RNA
  modified_base 1: mod_base = OTHER; note = 2'-O-methyl modified nucleotide with phosphorothioate linkage
  modified_base 2: mod_base = OTHER; note = 2'-O-methyl modified nucleotide with phosphorothioate linkage
  modified_base 3: mod_base = OTHER; note = 2'-O-methyl modified nucleotide with phosphorothioate linkage
  modified_base 88: mod_base = OTHER; note = Nucleotide with phosphorothioate linkage
  modified_base 89: mod_base = OTHER; note = 2'-O-methyl modified nucleotide with phosphorothioate linkage
  modified_base 90: mod_base = OTHER; note = 2'-O-methyl modified nucleotide with phosphorothioate linkage
  modified_base 91: mod_base = OTHER; note = 2'-O-methyl modified nucleotide

SEQ ID NO: 29575 - RNA, 90 nt, synthetic construct; identical to SEQ ID NO: 27156
  source 1..90: mol_type = other RNA
  modified_base 1: mod_base = OTHER; note = 2'-O-methyl modified nucleotide with phosphorothioate linkage
  modified_base 2: mod_base = OTHER; note = 2'-O-methyl modified nucleotide with phosphorothioate linkage
  modified_base 3: mod_base = OTHER; note = 2'-O-methyl modified nucleotide with phosphorothioate linkage
  modified_base 87: mod_base = OTHER; note = Nucleotide with phosphorothioate linkage
  modified_base 88: mod_base = OTHER; note = 2'-O-methyl modified nucleotide with phosphorothioate linkage
  modified_base 89: mod_base = OTHER; note = 2'-O-methyl modified nucleotide with phosphorothioate linkage
  modified_base 90: mod_base = OTHER; note = 2'-O-methyl modified nucleotide

SEQ ID NO: 29576 - RNA, 89 nt, synthetic construct; identical to SEQ ID NO: 27131
  source 1..89: mol_type = other RNA
  modified_base 1: mod_base = OTHER; note = 2'-O-methyl modified nucleotide with phosphorothioate linkage
  modified_base 2: mod_base = OTHER; note = 2'-O-methyl modified nucleotide with phosphorothioate linkage
  modified_base 3: mod_base = OTHER; note = 2'-O-methyl modified nucleotide with phosphorothioate linkage
  modified_base 86: mod_base = OTHER; note = Nucleotide with phosphorothioate linkage
  modified_base 87: mod_base = OTHER; note = 2'-O-methyl modified nucleotide with phosphorothioate linkage
  modified_base 88: mod_base = OTHER; note = 2'-O-methyl modified nucleotide with phosphorothioate linkage
  modified_base 89: mod_base = OTHER; note = 2'-O-methyl modified nucleotide

SEQ ID NO: 29577 - RNA, 96 nt, synthetic construct; identical to SEQ ID NO: 28265
  source 1..96: mol_type = other RNA
  modified_base 1: mod_base = OTHER; note = 2'-O-methyl modified nucleotide with phosphorothioate linkage
  modified_base 2: mod_base = OTHER; note = 2'-O-methyl modified nucleotide with phosphorothioate linkage
  modified_base 3: mod_base = OTHER; note = 2'-O-methyl modified nucleotide with phosphorothioate linkage
  modified_base 93: mod_base = OTHER; note = Nucleotide with phosphorothioate linkage
  modified_base 94: mod_base = OTHER; note = 2'-O-methyl modified nucleotide with phosphorothioate linkage
  modified_base 95: mod_base = OTHER; note = 2'-O-methyl modified nucleotide with phosphorothioate linkage
  modified_base 96: mod_base = OTHER; note = 2'-O-methyl modified nucleotide

SEQ ID NO: 29578 - RNA, 95 nt, synthetic construct; identical to SEQ ID NO: 27158
  source 1..95: mol_type = other RNA
  modified_base 1: mod_base = OTHER; note = 2'-O-methyl modified nucleotide with phosphorothioate linkage
  modified_base 2: mod_base = OTHER; note = 2'-O-methyl modified nucleotide with phosphorothioate linkage
  modified_base 3: mod_base = OTHER; note = 2'-O-methyl modified nucleotide with phosphorothioate linkage
  modified_base 92: mod_base = OTHER; note = Nucleotide with phosphorothioate linkage
  modified_base 93: mod_base = OTHER; note = 2'-O-methyl modified nucleotide with phosphorothioate linkage
  modified_base 94: mod_base = OTHER; note = 2'-O-methyl modified nucleotide with phosphorothioate linkage
  modified_base 95: mod_base = OTHER; note = 2'-O-methyl modified nucleotide

SEQ ID NO: 29579 - RNA, 94 nt, synthetic construct; identical to SEQ ID NO: 27159
  source 1..94: mol_type = other RNA
  modified_base 1: mod_base = OTHER; note = 2'-O-methyl modified nucleotide with phosphorothioate linkage
  modified_base 2: mod_base = OTHER; note = 2'-O-methyl modified nucleotide with phosphorothioate linkage
  modified_base 3: mod_base = OTHER; note = 2'-O-methyl modified nucleotide with phosphorothioate linkage
  modified_base 91: mod_base = OTHER; note = Nucleotide with phosphorothioate linkage
  modified_base 92: mod_base = OTHER; note = 2'-O-methyl modified nucleotide with phosphorothioate linkage
  modified_base 93: mod_base = OTHER; note = 2'-O-methyl modified nucleotide with phosphorothioate linkage
  modified_base 94: mod_base = OTHER; note = 2'-O-methyl modified nucleotide

SEQ ID NO: 29580 - RNA, 93 nt, synthetic construct; identical to SEQ ID NO: 27091
  source 1..93: mol_type = other RNA
  modified_base 1: mod_base = OTHER; note = 2'-O-methyl modified nucleotide with phosphorothioate linkage
  modified_base 2: mod_base = OTHER; note = 2'-O-methyl modified nucleotide with phosphorothioate linkage
  modified_base 3: mod_base = OTHER; note = 2'-O-methyl modified nucleotide with phosphorothioate linkage
  modified_base 90: mod_base = OTHER; note = Nucleotide with phosphorothioate linkage
  modified_base 91: mod_base = OTHER; note = 2'-O-methyl modified nucleotide with phosphorothioate linkage
  modified_base 92: mod_base = OTHER; note = 2'-O-methyl modified nucleotide with phosphorothioate linkage
  modified_base 93: mod_base = OTHER; note = 2'-O-methyl modified nucleotide

SEQ ID NO: 29581 - RNA, 92 nt, synthetic construct; identical to SEQ ID NO: 27001
  source 1..92: mol_type = other RNA
  modified_base 1: mod_base = OTHER; note = 2'-O-methyl modified nucleotide with phosphorothioate linkage
  modified_base 2: mod_base = OTHER; note = 2'-O-methyl modified nucleotide with phosphorothioate linkage
  modified_base 3: mod_base = OTHER; note = 2'-O-methyl modified nucleotide with phosphorothioate linkage
  modified_base 89: mod_base = OTHER; note = Nucleotide with phosphorothioate linkage
  modified_base 90: mod_base = OTHER; note = 2'-O-methyl modified nucleotide with phosphorothioate linkage
  modified_base 91: mod_base = OTHER; note = 2'-O-methyl modified nucleotide with phosphorothioate linkage
  modified_base 92: mod_base = OTHER; note = 2'-O-methyl modified nucleotide

SEQ ID NO: 29582 - RNA, 91 nt, synthetic construct; identical to SEQ ID NO: 27162
  source 1..91: mol_type = other RNA
  modified_base 1: mod_base = OTHER; note = 2'-O-methyl modified nucleotide with phosphorothioate linkage
  modified_base 2: mod_base = OTHER; note = 2'-O-methyl modified nucleotide with phosphorothioate linkage
  modified_base 3: mod_base = OTHER; note = 2'-O-methyl modified nucleotide with phosphorothioate linkage
  modified_base 88: mod_base = OTHER; note = Nucleotide with phosphorothioate linkage
  modified_base 89: mod_base = OTHER; note = 2'-O-methyl modified nucleotide with phosphorothioate linkage
  modified_base 90: mod_base = OTHER; note = 2'-O-methyl modified nucleotide with phosphorothioate linkage
  modified_base 91: mod_base = OTHER; note = 2'-O-methyl modified nucleotide

SEQ ID NO: 29583 - RNA, 90 nt, synthetic construct; identical to SEQ ID NO: 27163
  source 1..90: mol_type = other RNA
  modified_base 1: mod_base = OTHER; note = 2'-O-methyl modified nucleotide with phosphorothioate linkage
  modified_base 2: mod_base = OTHER; note = 2'-O-methyl modified nucleotide with phosphorothioate linkage
  modified_base 3: mod_base = OTHER; note = 2'-O-methyl modified nucleotide with phosphorothioate linkage
  modified_base 87: mod_base = OTHER; note = Nucleotide with phosphorothioate linkage
  modified_base 88: mod_base = OTHER; note = 2'-O-methyl modified nucleotide with phosphorothioate linkage
  modified_base 89: mod_base = OTHER; note = 2'-O-methyl modified nucleotide with phosphorothioate linkage
  modified_base 90: mod_base = OTHER; note = 2'-O-methyl modified nucleotide

SEQ ID NO: 29584 - RNA, 97 nt, synthetic construct; identical to SEQ ID NO: 27164
  source 1..97: mol_type = other RNA
  modified_base 1: mod_base = OTHER; note = 2'-O-methyl modified nucleotide with phosphorothioate linkage
  modified_base 2: mod_base = OTHER; note = 2'-O-methyl modified nucleotide with phosphorothioate linkage
  modified_base 3: mod_base = OTHER; note = 2'-O-methyl modified nucleotide with phosphorothioate linkage
  modified_base 94: mod_base = OTHER; note = Nucleotide with phosphorothioate linkage
  modified_base 95: mod_base = OTHER; note = 2'-O-methyl modified nucleotide with phosphorothioate linkage
  modified_base 96: mod_base = OTHER; note = 2'-O-methyl modified nucleotide with phosphorothioate linkage
  modified_base 97: mod_base = OTHER; note = 2'-O-methyl modified nucleotide

SEQ ID NO: 29585 - RNA, 96 nt, synthetic construct; identical to SEQ ID NO: 27165
  source 1..96: mol_type = other RNA
  modified_base 1: mod_base = OTHER; note = 2'-O-methyl modified nucleotide with phosphorothioate linkage
  modified_base 2: mod_base = OTHER; note = 2'-O-methyl modified nucleotide with phosphorothioate linkage
  modified_base 3: mod_base = OTHER; note = 2'-O-methyl modified nucleotide with phosphorothioate linkage
  modified_base 93: mod_base = OTHER; note = Nucleotide with phosphorothioate linkage
  modified_base 94: mod_base = OTHER; note = 2'-O-methyl modified nucleotide with phosphorothioate linkage
  modified_base 95: mod_base = OTHER; note = 2'-O-methyl modified nucleotide with phosphorothioate linkage
  modified_base 96: mod_base = OTHER; note = 2'-O-methyl modified nucleotide

SEQ ID NO: 29586 - RNA, 95 nt, synthetic construct; identical to SEQ ID NO: 27166
  source 1..95: mol_type = other RNA
  modified_base 1: mod_base = OTHER; note = 2'-O-methyl modified nucleotide with phosphorothioate linkage
  modified_base 2: mod_base = OTHER; note = 2'-O-methyl modified nucleotide with phosphorothioate linkage
  modified_base 3: mod_base = OTHER; note = 2'-O-methyl modified nucleotide with phosphorothioate linkage
  modified_base 92: mod_base = OTHER; note = Nucleotide with phosphorothioate linkage
  modified_base 93: mod_base = OTHER; note = 2'-O-methyl modified nucleotide with phosphorothioate linkage
  modified_base 94: mod_base = OTHER; note = 2'-O-methyl modified nucleotide with phosphorothioate linkage
  modified_base 95: mod_base = OTHER; note = 2'-O-methyl modified nucleotide

SEQ ID NO: 29587 - RNA, 94 nt, synthetic construct; identical to SEQ ID NO: 27167
  source 1..94: mol_type = other RNA
  modified_base 1: mod_base = OTHER; note = 2'-O-methyl modified nucleotide with phosphorothioate linkage
  modified_base 2: mod_base = OTHER; note = 2'-O-methyl modified nucleotide with phosphorothioate linkage
  modified_base 3: mod_base = OTHER; note = 2'-O-methyl modified nucleotide with phosphorothioate linkage
  modified_base 91: mod_base = OTHER; note = Nucleotide with phosphorothioate linkage
  modified_base 92: mod_base = OTHER; note = 2'-O-methyl modified nucleotide with phosphorothioate linkage
  modified_base 93: mod_base = OTHER; note = 2'-O-methyl modified nucleotide with phosphorothioate linkage
  modified_base 94: mod_base = OTHER; note = 2'-O-methyl modified nucleotide

SEQ ID NO: 29588 - RNA, 93 nt, synthetic construct; identical to SEQ ID NO: 27168
  source 1..93: mol_type = other RNA
  modified_base 1: mod_base = OTHER; note = 2'-O-methyl modified nucleotide with phosphorothioate linkage
  modified_base 2: mod_base = OTHER; note = 2'-O-methyl modified nucleotide with phosphorothioate linkage
  modified_base 3: mod_base = OTHER; note = 2'-O-methyl modified nucleotide with phosphorothioate linkage
  modified_base 90: mod_base = OTHER; note = Nucleotide with phosphorothioate linkage
  modified_base 91: mod_base = OTHER; note = 2'-O-methyl modified nucleotide with phosphorothioate linkage
  modified_base 92: mod_base = OTHER; note = 2'-O-methyl modified nucleotide with phosphorothioate linkage
  modified_base 93: mod_base = OTHER; note = 2'-O-methyl modified nucleotide

SEQ ID NO: 29589 - RNA, 92 nt, synthetic construct; identical to SEQ ID NO: 27169
  source 1..92: mol_type = other RNA
  modified_base 1: mod_base = OTHER; note = 2'-O-methyl modified nucleotide with phosphorothioate linkage
  modified_base 2: mod_base = OTHER; note = 2'-O-methyl modified nucleotide with phosphorothioate linkage
  modified_base 3: mod_base = OTHER; note = 2'-O-methyl modified nucleotide with phosphorothioate linkage
  modified_base 89: mod_base = OTHER; note = Nucleotide with phosphorothioate linkage
  modified_base 90: mod_base = OTHER; note = 2'-O-methyl modified nucleotide with phosphorothioate linkage
  modified_base 91: mod_base = OTHER; note = 2'-O-methyl modified nucleotide with phosphorothioate linkage
  modified_base 92: mod_base = OTHER; note = 2'-O-methyl modified nucleotide

SEQ ID NO: 29590 - RNA, 91 nt, synthetic construct; identical to SEQ ID NO: 27170
  source 1..91: mol_type = other RNA
  modified_base 1: mod_base = OTHER; note = 2'-O-methyl modified nucleotide with phosphorothioate linkage
  modified_base 2: mod_base = OTHER; note = 2'-O-methyl modified nucleotide with phosphorothioate linkage
  modified_base 3: mod_base = OTHER; note = 2'-O-methyl modified nucleotide with phosphorothioate linkage
  modified_base 88: mod_base = OTHER; note = Nucleotide with phosphorothioate linkage
  modified_base 89: mod_base = OTHER; note = 2'-O-methyl modified nucleotide with phosphorothioate linkage
  modified_base 90: mod_base = OTHER; note = 2'-O-methyl modified nucleotide with phosphorothioate linkage
  modified_base 91: mod_base = OTHER; note = 2'-O-methyl modified nucleotide

SEQ ID NO: 29591 - RNA, 98 nt, synthetic construct; identical to SEQ ID NO: 28289
  source 1..98: mol_type = other RNA
  modified_base 1: mod_base = OTHER; note = 2'-O-methyl modified nucleotide with phosphorothioate linkage
  modified_base 2: mod_base = OTHER; note = 2'-O-methyl modified nucleotide with phosphorothioate linkage
  modified_base 3: mod_base = OTHER; note = 2'-O-methyl modified nucleotide with phosphorothioate linkage
  modified_base 95: mod_base = OTHER; note = Nucleotide with phosphorothioate linkage
  modified_base 96: mod_base = OTHER; note = 2'-O-methyl modified nucleotide with phosphorothioate linkage
  modified_base 97: mod_base = OTHER; note = 2'-O-methyl modified nucleotide with phosphorothioate linkage
  modified_base 98: mod_base = OTHER; note = 2'-O-methyl modified nucleotide

SEQ ID NO: 29592 - RNA, 97 nt, synthetic construct; identical to SEQ ID NO: 28290
  source 1..97: mol_type = other RNA
  modified_base 1: mod_base = OTHER; note = 2'-O-methyl modified nucleotide with phosphorothioate linkage
  modified_base 2: mod_base = OTHER; note = 2'-O-methyl modified nucleotide with phosphorothioate linkage
  modified_base 3: mod_base = OTHER; note = 2'-O-methyl modified nucleotide with phosphorothioate linkage
  modified_base 94: mod_base = OTHER; note = Nucleotide with phosphorothioate linkage
  modified_base 95: mod_base = OTHER; note = 2'-O-methyl modified nucleotide with phosphorothioate linkage
  modified_base 96: mod_base = OTHER; note = 2'-O-methyl modified nucleotide with phosphorothioate linkage
  modified_base 97: mod_base = OTHER; note = 2'-O-methyl modified nucleotide

SEQ ID NO: 29593 - RNA, 96 nt, synthetic construct; identical to SEQ ID NO: 28291
  source 1..96: mol_type = other RNA
  modified_base 1: mod_base = OTHER; note = 2'-O-methyl modified nucleotide with phosphorothioate linkage
  modified_base 2: mod_base = OTHER; note = 2'-O-methyl modified nucleotide with phosphorothioate linkage
  modified_base 3: mod_base = OTHER; note = 2'-O-methyl modified nucleotide with phosphorothioate linkage
  modified_base 93: mod_base = OTHER; note = Nucleotide with phosphorothioate linkage
  modified_base 94: mod_base = OTHER; note = 2'-O-methyl modified nucleotide with phosphorothioate linkage
  modified_base 95: mod_base = OTHER; note = 2'-O-methyl modified nucleotide with phosphorothioate linkage
  modified_base 96: mod_base = OTHER; note = 2'-O-methyl modified nucleotide

SEQ ID NO: 29594 - RNA, 95 nt, synthetic construct; identical to SEQ ID NO: 28292
  source 1..95: mol_type = other RNA
  modified_base 1: mod_base = OTHER; note = 2'-O-methyl modified nucleotide with phosphorothioate linkage
  modified_base 2: mod_base = OTHER; note = 2'-O-methyl modified nucleotide with phosphorothioate linkage
  modified_base 3: mod_base = OTHER; note = 2'-O-methyl modified nucleotide with phosphorothioate linkage
  modified_base 92: mod_base = OTHER; note = Nucleotide with phosphorothioate linkage
  modified_base 93: mod_base = OTHER; note = 2'-O-methyl modified nucleotide with phosphorothioate linkage
  modified_base 94: mod_base = OTHER; note = 2'-O-methyl modified nucleotide with phosphorothioate linkage
  modified_base 95: mod_base = OTHER; note = 2'-O-methyl modified nucleotide

SEQ ID NO: 29595 - RNA, 94 nt, synthetic construct; identical to SEQ ID NO: 27171
  source 1..94: mol_type = other RNA
  modified_base 1: mod_base = OTHER; note = 2'-O-methyl modified nucleotide with phosphorothioate linkage
  modified_base 2: mod_base = OTHER; note = 2'-O-methyl modified nucleotide with phosphorothioate linkage
  modified_base 3: mod_base = OTHER; note = 2'-O-methyl modified nucleotide with phosphorothioate linkage
  modified_base 91: mod_base = OTHER; note = Nucleotide with phosphorothioate linkage
  modified_base 92: mod_base = OTHER; note = 2'-O-methyl modified nucleotide with phosphorothioate linkage
  modified_base 93: mod_base = OTHER; note = 2'-O-methyl modified nucleotide with phosphorothioate linkage
  modified_base 94: mod_base = OTHER; note = 2'-O-methyl modified nucleotide

SEQ ID NO: 29596 - RNA, 93 nt, synthetic construct; identical to SEQ ID NO: 27172
  source 1..93: mol_type = other RNA
  modified_base 1: mod_base = OTHER; note = 2'-O-methyl modified nucleotide with phosphorothioate linkage
  modified_base 2: mod_base = OTHER; note = 2'-O-methyl modified nucleotide with phosphorothioate linkage
  modified_base 3: mod_base = OTHER; note = 2'-O-methyl modified nucleotide with phosphorothioate linkage
  modified_base 90: mod_base = OTHER; note = Nucleotide with phosphorothioate linkage
  modified_base 91: mod_base = OTHER; note = 2'-O-methyl modified nucleotide with phosphorothioate linkage
  modified_base 92: mod_base = OTHER; note = 2'-O-methyl modified nucleotide with phosphorothioate linkage
  modified_base 93: mod_base = OTHER; note = 2'-O-methyl modified nucleotide

SEQ ID NO: 29597 - RNA, 92 nt, synthetic construct; identical to SEQ ID NO: 27173
  source 1..92: mol_type = other RNA
  modified_base 1: mod_base = OTHER; note = 2'-O-methyl modified nucleotide with phosphorothioate linkage
  modified_base 2: mod_base = OTHER; note = 2'-O-methyl modified nucleotide with phosphorothioate linkage
  modified_base 3: mod_base = OTHER; note = 2'-O-methyl modified nucleotide with phosphorothioate linkage
  modified_base 89: mod_base = OTHER; note = Nucleotide with phosphorothioate linkage
  modified_base 90: mod_base = OTHER; note = 2'-O-methyl modified nucleotide with phosphorothioate linkage
  modified_base 91: mod_base = OTHER; note = 2'-O-methyl modified nucleotide with phosphorothioate linkage
  modified_base 92: mod_base = OTHER; note = 2'-O-methyl modified nucleotide

SEQ ID NO: 29598 - RNA, 99 nt, synthetic construct; identical to SEQ ID NO: 28301
  source 1..99: mol_type = other RNA
  modified_base 1: mod_base = OTHER; note = 2'-O-methyl modified nucleotide with phosphorothioate linkage
  modified_base 2: mod_base = OTHER; note = 2'-O-methyl modified nucleotide with phosphorothioate linkage
  modified_base 3: mod_base = OTHER; note = 2'-O-methyl modified nucleotide with phosphorothioate linkage
  modified_base 96: mod_base = OTHER; note = Nucleotide with phosphorothioate linkage
  modified_base 97: mod_base = OTHER; note = 2'-O-methyl modified nucleotide with phosphorothioate linkage
  modified_base 98: mod_base = OTHER; note = 2'-O-methyl modified nucleotide with phosphorothioate linkage
  modified_base 99: mod_base = OTHER; note = 2'-O-methyl modified nucleotide

SEQ ID NO: 29599 - RNA, 98 nt, synthetic construct; identical to SEQ ID NO: 28302
  source 1..98: mol_type = other RNA
  modified_base 1: mod_base = OTHER; note = 2'-O-methyl modified nucleotide with phosphorothioate linkage
  modified_base 2: mod_base = OTHER; note = 2'-O-methyl modified nucleotide with phosphorothioate linkage
  modified_base 3: mod_base = OTHER; note = 2'-O-methyl modified nucleotide with phosphorothioate linkage
  modified_base 95: mod_base = OTHER; note = Nucleotide with phosphorothioate linkage
  modified_base 96: mod_base = OTHER; note = 2'-O-methyl modified nucleotide with phosphorothioate linkage
  modified_base 97: mod_base = OTHER; note = 2'-O-methyl modified nucleotide with phosphorothioate linkage
  modified_base 98: mod_base = OTHER; note = 2'-O-methyl modified nucleotide

SEQ ID NO: 29600 - RNA, 97 nt, synthetic construct; identical to SEQ ID NO: 28303
  source 1..97: mol_type = other RNA
  modified_base 1: mod_base = OTHER; note = 2'-O-methyl modified nucleotide with phosphorothioate linkage
  modified_base 2: mod_base = OTHER; note = 2'-O-methyl modified nucleotide with phosphorothioate linkage
  modified_base 3: mod_base = OTHER; note = 2'-O-methyl modified nucleotide with phosphorothioate linkage
  modified_base 94: mod_base = OTHER; note = Nucleotide with phosphorothioate linkage
  modified_base 95: mod_base = OTHER; note = 2'-O-methyl modified nucleotide with phosphorothioate linkage
  modified_base 96: mod_base = OTHER; note = 2'-O-methyl modified nucleotide with phosphorothioate linkage
  modified_base 97: mod_base = OTHER; note = 2'-O-methyl modified nucleotide

SEQ ID NO: 29601 - RNA, 96 nt, synthetic construct; identical to SEQ ID NO: 28304
  source 1..96: mol_type = other RNA
  modified_base 1: mod_base = OTHER; note = 2'-O-methyl modified nucleotide with phosphorothioate linkage
  modified_base 2: mod_base = OTHER; note = 2'-O-methyl modified nucleotide with phosphorothioate linkage
  modified_base 3: mod_base = OTHER; note = 2'-O-methyl modified nucleotide with phosphorothioate linkage
  modified_base 93: mod_base = OTHER; note = Nucleotide with phosphorothioate linkage
  modified_base 94: mod_base = OTHER; note = 2'-O-methyl modified nucleotide with phosphorothioate linkage
  modified_base 95: mod_base = OTHER; note = 2'-O-methyl modified nucleotide with phosphorothioate linkage
  modified_base 96: mod_base = OTHER; note = 2'-O-methyl modified nucleotide

SEQ ID NO: 29602 - RNA, 95 nt, synthetic construct; identical to SEQ ID NO: 27174
  source 1..95: mol_type = other RNA
  modified_base 1: mod_base = OTHER; note = 2'-O-methyl modified nucleotide with phosphorothioate linkage
  modified_base 2: mod_base = OTHER; note = 2'-O-methyl modified nucleotide with phosphorothioate linkage
  modified_base 3: mod_base = OTHER; note = 2'-O-methyl modified nucleotide with phosphorothioate linkage
  modified_base 92: mod_base = OTHER; note = Nucleotide with phosphorothioate linkage
  modified_base 93: mod_base = OTHER; note = 2'-O-methyl modified nucleotide with phosphorothioate linkage
  modified_base 94: mod_base = OTHER; note = 2'-O-methyl modified nucleotide with phosphorothioate linkage
  modified_base 95: mod_base = OTHER; note = 2'-O-methyl modified nucleotide

SEQ ID NO: 29603 - RNA, 94 nt, synthetic construct; identical to SEQ ID NO: 27175
  source 1..94: mol_type = other RNA
  modified_base 1: mod_base = OTHER; note = 2'-O-methyl modified nucleotide with phosphorothioate linkage
  modified_base 2: mod_base = OTHER; note = 2'-O-methyl modified nucleotide with phosphorothioate linkage
  modified_base 3: mod_base = OTHER; note = 2'-O-methyl modified nucleotide with phosphorothioate linkage
  modified_base 91: mod_base = OTHER; note = Nucleotide with phosphorothioate linkage
  modified_base 92: mod_base = OTHER; note = 2'-O-methyl modified nucleotide with phosphorothioate linkage
  modified_base 93: mod_base = OTHER; note = 2'-O-methyl modified nucleotide with phosphorothioate linkage
  modified_base 94: mod_base = OTHER; note = 2'-O-methyl modified nucleotide

SEQ ID NO: 29604 - RNA, 93 nt, synthetic construct; identical to SEQ ID NO: 27176
  source 1..93: mol_type = other RNA
  modified_base 1: mod_base = OTHER; note = 2'-O-methyl modified nucleotide with phosphorothioate linkage
  modified_base 2: mod_base = OTHER; note = 2'-O-methyl modified nucleotide with phosphorothioate linkage
  modified_base 3: mod_base = OTHER; note = 2'-O-methyl modified nucleotide with phosphorothioate linkage
  modified_base 90: mod_base = OTHER; note = Nucleotide with phosphorothioate linkage
  modified_base 91: mod_base = OTHER; note = 2'-O-methyl modified nucleotide with phosphorothioate linkage
  modified_base 92: mod_base = OTHER; note = 2'-O-methyl modified nucleotide with phosphorothioate linkage
  modified_base 93: mod_base = OTHER; note = 2'-O-methyl modified nucleotide

SEQ ID NO: 29605 - RNA, 100 nt, synthetic construct; identical to SEQ ID NO: 28313
  source 1..100: mol_type = other RNA
  modified_base 1: mod_base = OTHER; note = 2'-O-methyl modified nucleotide with phosphorothioate linkage
  modified_base 2: mod_base = OTHER; note = 2'-O-methyl modified nucleotide with phosphorothioate linkage
  modified_base 3: mod_base = OTHER; note = 2'-O-methyl modified nucleotide with phosphorothioate linkage
  modified_base 97: mod_base = OTHER; note = Nucleotide with phosphorothioate linkage
  modified_base 98: mod_base = OTHER; note = 2'-O-methyl modified nucleotide with phosphorothioate linkage
  modified_base 99: mod_base = OTHER; note = 2'-O-methyl modified nucleotide with phosphorothioate linkage
  modified_base 100: mod_base = OTHER; note = 2'-O-methyl modified nucleotide

SEQ ID NO: 29606 - RNA, 99 nt, synthetic construct; identical to SEQ ID NO: 28314
  source 1..99: mol_type = other RNA
  modified_base 1: mod_base = OTHER; note = 2'-O-methyl modified nucleotide with phosphorothioate linkage
  modified_base 2: mod_base = OTHER; note = 2'-O-methyl modified nucleotide with phosphorothioate linkage
  modified_base 3: mod_base = OTHER; note = 2'-O-methyl modified nucleotide with phosphorothioate linkage
  modified_base 96: mod_base = OTHER; note = Nucleotide with phosphorothioate linkage
  modified_base 97: mod_base = OTHER; note = 2'-O-methyl modified nucleotide with phosphorothioate linkage
  modified_base 98: mod_base = OTHER; note = 2'-O-methyl modified nucleotide with phosphorothioate linkage
  modified_base 99: mod_base = OTHER; note = 2'-O-methyl modified nucleotide

SEQ ID NO: 29607 - RNA, 98 nt, synthetic construct; identical to SEQ ID NO: 28315
  source 1..98: mol_type = other RNA
  modified_base 1: mod_base = OTHER; note = 2'-O-methyl modified nucleotide with phosphorothioate linkage
  modified_base 2: mod_base = OTHER; note = 2'-O-methyl modified nucleotide with phosphorothioate linkage
  modified_base 3: mod_base = OTHER; note = 2'-O-methyl modified nucleotide with phosphorothioate linkage
  modified_base 95: mod_base = OTHER; note = Nucleotide with phosphorothioate linkage
  modified_base 96: mod_base = OTHER; note = 2'-O-methyl modified nucleotide with phosphorothioate linkage
  modified_base 97: mod_base = OTHER; note = 2'-O-methyl modified nucleotide with phosphorothioate linkage
  modified_base 98: mod_base = OTHER; note = 2'-O-methyl modified nucleotide

SEQ ID NO: 29608 - RNA, 97 nt, synthetic construct; identical to SEQ ID NO: 28316
  source 1..97: mol_type = other RNA
  modified_base 1: mod_base = OTHER; note = 2'-O-methyl modified nucleotide with phosphorothioate linkage
  modified_base 2: mod_base = OTHER; note = 2'-O-methyl modified nucleotide with phosphorothioate linkage
  modified_base 3: mod_base = OTHER; note = 2'-O-methyl modified nucleotide with phosphorothioate linkage
  modified_base 94: mod_base = OTHER; note = Nucleotide with phosphorothioate linkage
  modified_base 95: mod_base = OTHER; note = 2'-O-methyl modified nucleotide with phosphorothioate linkage
  modified_base 96: mod_base = OTHER; note = 2'-O-methyl modified nucleotide with phosphorothioate linkage
  modified_base 97: mod_base = OTHER; note = 2'-O-methyl modified nucleotide

SEQ ID NO: 29609 - RNA, 96 nt, synthetic construct; identical to SEQ ID NO: 27133
  source 1..96: mol_type = other RNA
  modified_base 1: mod_base = OTHER; note = 2'-O-methyl modified nucleotide with phosphorothioate linkage
  modified_base 2: mod_base = OTHER; note = 2'-O-methyl modified nucleotide with phosphorothioate linkage
  modified_base 3: mod_base = OTHER; note = 2'-O-methyl modified nucleotide with phosphorothioate linkage
  modified_base 93: mod_base = OTHER; note = Nucleotide with phosphorothioate linkage
  modified_base 94: mod_base = OTHER; note = 2'-O-methyl modified nucleotide with phosphorothioate linkage
  modified_base 95: mod_base = OTHER; note = 2'-O-methyl modified nucleotide with phosphorothioate linkage
  modified_base 96: mod_base = OTHER; note = 2'-O-methyl modified nucleotide

SEQ ID NO: 29610 - RNA, 95 nt, synthetic construct; identical to SEQ ID NO: 27178
  source 1..95: mol_type = other RNA
  modified_base 1: mod_base = OTHER; note = 2'-O-methyl modified nucleotide with phosphorothioate linkage
  modified_base 2: mod_base = OTHER; note = 2'-O-methyl modified nucleotide with phosphorothioate linkage
  modified_base 3: mod_base = OTHER; note = 2'-O-methyl modified nucleotide with phosphorothioate linkage
  modified_base 92: mod_base = OTHER; note = Nucleotide with phosphorothioate linkage
  modified_base 93: mod_base = OTHER; note = 2'-O-methyl modified nucleotide with phosphorothioate linkage
  modified_base 94: mod_base = OTHER; note = 2'-O-methyl modified nucleotide with phosphorothioate linkage
  modified_base 95: mod_base = OTHER; note = 2'-O-methyl modified nucleotide

SEQ ID NO: 29611 - RNA, 94 nt, synthetic construct; identical to SEQ ID NO: 27179
  source 1..94: mol_type = other RNA
  modified_base 1: mod_base = OTHER; note = 2'-O-methyl modified nucleotide with phosphorothioate linkage
  modified_base 2: mod_base = OTHER; note = 2'-O-methyl modified nucleotide with phosphorothioate linkage
  modified_base 3: mod_base = OTHER; note = 2'-O-methyl modified nucleotide with phosphorothioate linkage
  modified_base 91: mod_base = OTHER; note = Nucleotide with phosphorothioate linkage
  modified_base 92: mod_base = OTHER; note = 2'-O-methyl modified nucleotide with phosphorothioate linkage
  modified_base 93: mod_base = OTHER; note = 2'-O-methyl modified nucleotide with phosphorothioate linkage
  modified_base 94: mod_base = OTHER; note = 2'-O-methyl modified nucleotide

SEQ ID NO: 29612 - RNA, 101 nt, synthetic construct; identical to SEQ ID NO: 28325
  source 1..101: mol_type = other RNA
  modified_base 1: mod_base = OTHER; note = 2'-O-methyl modified nucleotide with phosphorothioate linkage
  modified_base 2: mod_base = OTHER; note = 2'-O-methyl modified nucleotide with phosphorothioate linkage
  modified_base 3: mod_base = OTHER; note = 2'-O-methyl modified nucleotide with phosphorothioate linkage
  modified_base 98: mod_base = OTHER; note = Nucleotide with phosphorothioate linkage
  modified_base 99: mod_base = OTHER; note = 2'-O-methyl modified nucleotide with phosphorothioate linkage
  modified_base 100: mod_base = OTHER; note = 2'-O-methyl modified nucleotide with phosphorothioate linkage
  modified_base 101: mod_base = OTHER; note = 2'-O-methyl modified nucleotide

SEQ ID NO: 29613 - RNA, 100 nt, synthetic construct; identical to SEQ ID NO: 28326
  source 1..100: mol_type = other RNA
  modified_base 1: mod_base = OTHER; note = 2'-O-methyl modified nucleotide with phosphorothioate linkage
  modified_base 2: mod_base = OTHER; note = 2'-O-methyl modified nucleotide with phosphorothioate linkage
  modified_base 3: mod_base = OTHER; note = 2'-O-methyl modified nucleotide with phosphorothioate linkage
  modified_base 97: mod_base = OTHER; note = Nucleotide with phosphorothioate linkage
  modified_base 98: mod_base = OTHER; note = 2'-O-methyl modified nucleotide with phosphorothioate linkage
  modified_base 99: mod_base = OTHER; note = 2'-O-methyl modified nucleotide with phosphorothioate linkage
  modified_base 100: mod_base = OTHER; note = 2'-O-methyl modified nucleotide

SEQ ID NO: 29614 - RNA, 99 nt, synthetic construct; identical to SEQ ID NO: 28327
  source 1..99: mol_type = other RNA
  modified_base 1: mod_base = OTHER; note = 2'-O-methyl modified nucleotide with phosphorothioate linkage
  modified_base 2: mod_base = OTHER; note = 2'-O-methyl modified nucleotide with phosphorothioate linkage
  modified_base 3: mod_base = OTHER; note = 2'-O-methyl modified nucleotide with phosphorothioate linkage
  modified_base 96: mod_base = OTHER; note = Nucleotide with phosphorothioate linkage
  modified_base 97: mod_base = OTHER; note = 2'-O-methyl modified nucleotide with phosphorothioate linkage
  modified_base 98: mod_base = OTHER; note = 2'-O-methyl modified nucleotide with phosphorothioate linkage
  modified_base 99: mod_base = OTHER; note = 2'-O-methyl modified nucleotide

SEQ ID NO: 29615 - RNA, 98 nt, synthetic construct; identical to SEQ ID NO: 28328
  source 1..98: mol_type = other RNA
  modified_base 1: mod_base = OTHER; note = 2'-O-methyl modified nucleotide with phosphorothioate linkage
  modified_base 2: mod_base = OTHER; note = 2'-O-methyl modified nucleotide with phosphorothioate linkage
  modified_base 3: mod_base = OTHER; note = 2'-O-methyl modified nucleotide with phosphorothioate linkage
  modified_base 95: mod_base = OTHER; note = Nucleotide with phosphorothioate linkage
  modified_base 96: mod_base = OTHER; note = 2'-O-methyl modified nucleotide with phosphorothioate linkage
  modified_base 97: mod_base = OTHER; note = 2'-O-methyl modified nucleotide with phosphorothioate linkage
  modified_base 98: mod_base = OTHER; note = 2'-O-methyl modified nucleotide

SEQ ID NO: 29616 - RNA, 97 nt, synthetic construct; identical to SEQ ID NO: 28329
  source 1..97: mol_type = other RNA
  modified_base 1: mod_base = OTHER; note = 2'-O-methyl modified nucleotide with phosphorothioate linkage
  modified_base 2: mod_base = OTHER; note = 2'-O-methyl modified nucleotide with phosphorothioate linkage
  modified_base 3: mod_base = OTHER; note = 2'-O-methyl modified nucleotide with phosphorothioate linkage
  modified_base 94: mod_base = OTHER; note = Nucleotide with phosphorothioate linkage
  modified_base 95: mod_base = OTHER; note = 2'-O-methyl modified nucleotide with phosphorothioate linkage
  modified_base 96: mod_base = OTHER; note = 2'-O-methyl modified nucleotide with phosphorothioate linkage
  modified_base 97: mod_base = OTHER; note = 2'-O-methyl modified nucleotide

SEQ ID NO: 29617 - RNA, 96 nt, synthetic construct; identical to SEQ ID NO: 28330
  source 1..96: mol_type = other RNA
  modified_base 1: mod_base = OTHER; note = 2'-O-methyl modified nucleotide with phosphorothioate linkage
  modified_base 2: mod_base = OTHER; note = 2'-O-methyl modified nucleotide with phosphorothioate linkage
  modified_base 3: mod_base = OTHER; note = 2'-O-methyl modified nucleotide with phosphorothioate linkage
  modified_base 93: mod_base = OTHER; note = Nucleotide with phosphorothioate linkage
  modified_base 94: mod_base = OTHER; note = 2'-O-methyl modified nucleotide with phosphorothioate linkage
  modified_base 95: mod_base = OTHER; note = 2'-O-methyl modified nucleotide with phosphorothioate linkage
  modified_base 96: mod_base = OTHER; note = 2'-O-methyl modified nucleotide

SEQ ID NO: 29618 - RNA, 95 nt, synthetic construct; identical to SEQ ID NO: 28331
  source 1..95: mol_type = other RNA
  modified_base 1: mod_base = OTHER; note = 2'-O-methyl modified nucleotide with phosphorothioate linkage
  modified_base 2: mod_base = OTHER; note = 2'-O-methyl modified nucleotide with phosphorothioate linkage
  modified_base 3: mod_base = OTHER; note = 2'-O-methyl modified nucleotide with phosphorothioate linkage
  modified_base 92: mod_base = OTHER; note = Nucleotide with phosphorothioate linkage
  modified_base 93: mod_base = OTHER; note = 2'-O-methyl modified nucleotide with phosphorothioate linkage
  modified_base 94: mod_base = OTHER; note = 2'-O-methyl modified nucleotide with phosphorothioate linkage
  modified_base 95: mod_base = OTHER; note = 2'-O-methyl modified nucleotide

SEQ ID NO: 29619 - RNA, 102 nt, synthetic construct; identical to SEQ ID NO: 28337
  source 1..102: mol_type = other RNA
  modified_base 1: mod_base = OTHER; note = 2'-O-methyl modified nucleotide with phosphorothioate linkage
  modified_base 2: mod_base = OTHER; note = 2'-O-methyl modified nucleotide with phosphorothioate linkage
  modified_base 3: mod_base = OTHER; note = 2'-O-methyl modified nucleotide with phosphorothioate linkage
  modified_base 99: mod_base = OTHER; note = Nucleotide with phosphorothioate linkage
  modified_base 100: mod_base = OTHER; note = 2'-O-methyl modified nucleotide with phosphorothioate linkage
  modified_base 101: mod_base = OTHER; note = 2'-O-methyl modified nucleotide with phosphorothioate linkage
  modified_base 102: mod_base = OTHER; note = 2'-O-methyl modified nucleotide

SEQ ID NO: 29620 - RNA, 101 nt, synthetic construct; identical to SEQ ID NO: 28338
  source 1..101: mol_type = other RNA
  modified_base 1: mod_base = OTHER; note = 2'-O-methyl modified nucleotide with phosphorothioate linkage
  modified_base 2: mod_base = OTHER; note = 2'-O-methyl modified nucleotide with phosphorothioate linkage
  modified_base 3: mod_base = OTHER; note = 2'-O-methyl modified nucleotide with phosphorothioate linkage
  modified_base 98: mod_base = OTHER; note = Nucleotide with phosphorothioate linkage
  modified_base 99: mod_base = OTHER; note = 2'-O-methyl modified nucleotide with phosphorothioate linkage
  modified_base 100: mod_base = OTHER; note = 2'-O-methyl modified nucleotide with phosphorothioate linkage
  modified_base 101: mod_base = OTHER; note = 2'-O-methyl modified nucleotide

SEQ ID NO: 29621 - RNA, 100 nt, synthetic construct; identical to SEQ ID NO: 28339
  source 1..100: mol_type = other RNA
  modified_base 1: mod_base = OTHER; note = 2'-O-methyl modified nucleotide with phosphorothioate linkage
  modified_base 2: mod_base = OTHER; note = 2'-O-methyl modified nucleotide with phosphorothioate linkage
  modified_base 3: mod_base = OTHER; note = 2'-O-methyl modified nucleotide with phosphorothioate linkage
  modified_base 97: mod_base = OTHER; note = Nucleotide with phosphorothioate linkage
  modified_base 98: mod_base = OTHER; note = 2'-O-methyl modified nucleotide with phosphorothioate linkage
  modified_base 99: mod_base = OTHER; note = 2'-O-methyl modified nucleotide with phosphorothioate linkage
  modified_base 100: mod_base = OTHER; note = 2'-O-methyl modified nucleotide

SEQ ID NO: 29622 - RNA, 99 nt, synthetic construct; identical to SEQ ID NO: 28340
  source 1..99: mol_type = other RNA
  modified_base 1: mod_base = OTHER; note = 2'-O-methyl modified nucleotide with phosphorothioate linkage
  modified_base 2: mod_base = OTHER; note = 2'-O-methyl modified nucleotide with phosphorothioate linkage
  modified_base 3: mod_base = OTHER; note = 2'-O-methyl modified nucleotide with phosphorothioate linkage
  modified_base 96: mod_base = OTHER; note = Nucleotide with phosphorothioate linkage
  modified_base 97: mod_base = OTHER; note = 2'-O-methyl modified nucleotide with phosphorothioate linkage
  modified_base 98: mod_base = OTHER; note = 2'-O-methyl modified nucleotide with phosphorothioate linkage
  modified_base 99: mod_base = OTHER; note = 2'-O-methyl modified nucleotide

SEQ ID NO: 29623 - RNA, 98 nt, synthetic construct; identical to SEQ ID NO: 27180
  source 1..98: mol_type = other RNA
  modified_base 1: mod_base = OTHER; note = 2'-O-methyl modified nucleotide with phosphorothioate linkage
  modified_base 2: mod_base = OTHER; note = 2'-O-methyl modified nucleotide with phosphorothioate linkage
  modified_base 3: mod_base = OTHER; note = 2'-O-methyl modified nucleotide with phosphorothioate linkage
  modified_base 95: mod_base = OTHER; note = Nucleotide with phosphorothioate linkage
  modified_base 96: mod_base = OTHER; note = 2'-O-methyl modified nucleotide with phosphorothioate linkage
  modified_base 97: mod_base = OTHER; note = 2'-O-methyl modified nucleotide with phosphorothioate linkage
  modified_base 98: mod_base = OTHER; note = 2'-O-methyl modified nucleotide

SEQ ID NO: 29624 - RNA, 97 nt, synthetic construct; identical to SEQ ID NO: 28342
  source 1..97: mol_type = other RNA
  modified_base 1: mod_base = OTHER; note = 2'-O-methyl modified nucleotide with phosphorothioate linkage
  modified_base 2: mod_base = OTHER; note = 2'-O-methyl modified nucleotide with phosphorothioate linkage
  modified_base 3: mod_base = OTHER; note = 2'-O-methyl modified nucleotide with phosphorothioate linkage
  modified_base 94: mod_base = OTHER; note = Nucleotide with phosphorothioate linkage
  modified_base 95: mod_base = OTHER; note = 2'-O-methyl modified nucleotide with phosphorothioate linkage
  modified_base 96: mod_base = OTHER; note = 2'-O-methyl modified nucleotide with phosphorothioate linkage
  modified_base 97: mod_base = OTHER; note = 2'-O-methyl modified nucleotide

SEQ ID NO: 29625 - RNA, 96 nt, synthetic construct; identical to SEQ ID NO: 28343
  source 1..96: mol_type = other RNA
  modified_base 1: mod_base = OTHER; note = 2'-O-methyl modified nucleotide with phosphorothioate linkage
  modified_base 2: mod_base = OTHER; note = 2'-O-methyl modified nucleotide with phosphorothioate linkage
  modified_base 3: mod_base = OTHER; note = 2'-O-methyl modified nucleotide with phosphorothioate linkage
  modified_base 93: mod_base = OTHER; note = Nucleotide with phosphorothioate linkage
  modified_base 94: mod_base = OTHER; note = 2'-O-methyl modified nucleotide with phosphorothioate linkage
  modified_base 95: mod_base = OTHER; note = 2'-O-methyl modified nucleotide with phosphorothioate linkage
  modified_base 96: mod_base = OTHER; note = 2'-O-methyl modified nucleotide

SEQ ID NO: 29626 - RNA, 104 nt, synthetic construct; identical to SEQ ID NO: 28361
  source 1..104: mol_type = other RNA
  modified_base 1: mod_base = OTHER; note = 2'-O-methyl modified nucleotide with phosphorothioate linkage
  modified_base 2: mod_base = OTHER; note = 2'-O-methyl modified nucleotide with phosphorothioate linkage
  modified_base 3: mod_base = OTHER; note = 2'-O-methyl modified nucleotide with phosphorothioate linkage
  modified_base 101: mod_base = OTHER; note = Nucleotide with phosphorothioate linkage
  modified_base 102: mod_base = OTHER; note = 2'-O-methyl modified nucleotide with phosphorothioate linkage
  modified_base 103: mod_base = OTHER; note = 2'-O-methyl modified nucleotide with phosphorothioate linkage
  modified_base 104: mod_base = OTHER; note = 2'-O-methyl modified nucleotide

SEQ ID NO: 29627 - RNA, 103 nt, synthetic construct; identical to SEQ ID NO: 28362
  source 1..103: mol_type = other RNA
  modified_base 1: mod_base = OTHER; note = 2'-O-methyl modified nucleotide with phosphorothioate linkage
  modified_base 2: mod_base = OTHER; note = 2'-O-methyl modified nucleotide with phosphorothioate linkage
  modified_base 3: mod_base = OTHER; note = 2'-O-methyl modified nucleotide with phosphorothioate linkage
  modified_base 100: mod_base = OTHER; note = Nucleotide with phosphorothioate linkage
  modified_base 101: mod_base = OTHER; note = 2'-O-methyl modified nucleotide with phosphorothioate linkage
  modified_base 102: mod_base = OTHER; note = 2'-O-methyl modified nucleotide with phosphorothioate linkage
  modified_base 103: mod_base = OTHER; note = 2'-O-methyl modified nucleotide

SEQ ID NO: 29628 - RNA, 102 nt, synthetic construct; identical to SEQ ID NO: 28363
  source 1..102: mol_type = other RNA
  modified_base 1: mod_base = OTHER; note = 2'-O-methyl modified nucleotide with phosphorothioate linkage
  modified_base 2: mod_base = OTHER; note = 2'-O-methyl modified nucleotide with phosphorothioate linkage
  modified_base 3: mod_base = OTHER; note = 2'-O-methyl modified nucleotide with phosphorothioate linkage
  modified_base 99: mod_base = OTHER; note = Nucleotide with phosphorothioate linkage
  modified_base 100: mod_base = OTHER; note = 2'-O-methyl modified nucleotide with phosphorothioate linkage
  modified_base 101: mod_base = OTHER; note = 2'-O-methyl modified nucleotide with phosphorothioate linkage
  modified_base 102: mod_base = OTHER; note = 2'-O-methyl modified nucleotide

SEQ ID NO: 29629 - RNA, 101 nt, synthetic construct; identical to SEQ ID NO: 27181
  source 1..101: mol_type = other RNA
  modified_base 1: mod_base = OTHER; note = 2'-O-methyl modified nucleotide with phosphorothioate linkage
  modified_base 2: mod_base = OTHER; note = 2'-O-methyl modified nucleotide with phosphorothioate linkage
  modified_base 3: mod_base = OTHER; note = 2'-O-methyl modified nucleotide with phosphorothioate linkage
  modified_base 98: mod_base = OTHER; note = Nucleotide with phosphorothioate linkage
  modified_base 99: mod_base = OTHER; note = 2'-O-methyl modified nucleotide with phosphorothioate linkage
  modified_base 100: mod_base = OTHER; note = 2'-O-methyl modified nucleotide with phosphorothioate linkage
  modified_base 101: mod_base = OTHER; note = 2'-O-methyl modified nucleotide

SEQ ID NO: 29630 - RNA, 100 nt, synthetic construct; identical to SEQ ID NO: 27182
  source 1..100: mol_type = other RNA
  modified_base 1: mod_base = OTHER; note = 2'-O-methyl modified nucleotide with phosphorothioate linkage
  modified_base 2: mod_base = OTHER; note = 2'-O-methyl modified nucleotide with phosphorothioate linkage
  modified_base 3: mod_base = OTHER; note = 2'-O-methyl modified nucleotide with phosphorothioate linkage
  modified_base 97: mod_base = OTHER; note = Nucleotide with phosphorothioate linkage
  modified_base 98: mod_base = OTHER; note = 2'-O-methyl modified nucleotide with phosphorothioate linkage
  modified_base 99: mod_base = OTHER; note = 2'-O-methyl modified nucleotide with phosphorothioate linkage
  modified_base 100: mod_base = OTHER; note = 2'-O-methyl modified nucleotide

SEQ ID NO: 29631 - RNA, 99 nt, synthetic construct; identical to SEQ ID NO: 28366
  source 1..99: mol_type = other RNA
  modified_base 1: mod_base = OTHER; note = 2'-O-methyl modified nucleotide with phosphorothioate linkage
  modified_base 2: mod_base = OTHER; note = 2'-O-methyl modified nucleotide with phosphorothioate linkage
  modified_base 3: mod_base = OTHER; note = 2'-O-methyl modified nucleotide with phosphorothioate linkage
  modified_base 96: mod_base = OTHER; note = Nucleotide with phosphorothioate linkage
  modified_base 97: mod_base = OTHER; note = 2'-O-methyl modified nucleotide with phosphorothioate linkage
  modified_base 98: mod_base = OTHER; note = 2'-O-methyl modified nucleotide with phosphorothioate linkage
  modified_base 99: mod_base = OTHER; note = 2'-O-methyl modified nucleotide

SEQ ID NO: 29632 - RNA, 98 nt, synthetic construct; identical to SEQ ID NO: 28367
  source 1..98: mol_type = other RNA
  modified_base 1: mod_base = OTHER; note = 2'-O-methyl modified nucleotide with phosphorothioate linkage
  modified_base 2: mod_base = OTHER; note = 2'-O-methyl modified nucleotide with phosphorothioate linkage
  modified_base 3: mod_base = OTHER; note = 2'-O-methyl modified nucleotide with phosphorothioate linkage
  modified_base 95: mod_base = OTHER; note = Nucleotide with phosphorothioate linkage
  modified_base 96: mod_base = OTHER; note = 2'-O-methyl modified nucleotide with phosphorothioate linkage
  modified_base 97: mod_base = OTHER; note = 2'-O-methyl modified nucleotide with phosphorothioate linkage
  modified_base 98: mod_base = OTHER; note = 2'-O-methyl modified nucleotide

SEQ ID NO: 29633 - RNA, 106 nt, synthetic construct; identical to SEQ ID NO: 28385
  source 1..106: mol_type = other RNA
  modified_base 1: mod_base = OTHER; note = 2'-O-methyl modified nucleotide with phosphorothioate linkage
  modified_base 2: mod_base = OTHER; note = 2'-O-methyl modified nucleotide with phosphorothioate linkage
  modified_base 3: mod_base = OTHER; note = 2'-O-methyl modified nucleotide with phosphorothioate linkage
  modified_base 103: mod_base = OTHER; note = Nucleotide with phosphorothioate linkage
  modified_base 104: mod_base = OTHER; note = 2'-O-methyl modified nucleotide with phosphorothioate linkage
  modified_base 105: mod_base = OTHER; note = 2'-O-methyl modified nucleotide with phosphorothioate linkage
  modified_base 106: mod_base = OTHER; note = 2'-O-methyl modified nucleotide

SEQ ID NO: 29634 - RNA, 105 nt, synthetic construct; identical to SEQ ID NO: 28386
  source 1..105: mol_type = other RNA
  modified_base 1: mod_base = OTHER; note = 2'-O-methyl modified nucleotide with phosphorothioate linkage
  modified_base 2: mod_base = OTHER; note = 2'-O-methyl modified nucleotide with phosphorothioate linkage
  modified_base 3: mod_base = OTHER; note = 2'-O-methyl modified nucleotide with phosphorothioate linkage
  modified_base 102: mod_base = OTHER; note = Nucleotide with phosphorothioate linkage
  modified_base 103: mod_base = OTHER; note = 2'-O-methyl modified nucleotide with phosphorothioate linkage
  modified_base 104: mod_base = OTHER; note = 2'-O-methyl modified nucleotide with phosphorothioate linkage
  modified_base 105: mod_base = OTHER; note = 2'-O-methyl modified nucleotide

SEQ ID NO: 29635 - RNA, 104 nt, synthetic construct; identical to SEQ ID NO: 28387
  source 1..104: mol_type = other RNA
  modified_base 1: mod_base = OTHER; note = 2'-O-methyl modified nucleotide with phosphorothioate linkage
  modified_base 2: mod_base = OTHER; note = 2'-O-methyl modified nucleotide with phosphorothioate linkage
  modified_base 3: mod_base = OTHER; note = 2'-O-methyl modified nucleotide with phosphorothioate linkage
  modified_base 101: mod_base = OTHER; note = Nucleotide with phosphorothioate linkage
  modified_base 102: mod_base = OTHER; note = 2'-O-methyl modified nucleotide with phosphorothioate linkage
  modified_base 103: mod_base = OTHER; note = 2'-O-methyl modified nucleotide with phosphorothioate linkage
  modified_base 104: mod_base = OTHER; note = 2'-O-methyl modified nucleotide

SEQ ID NO: 29636 - RNA, 103 nt, synthetic construct; identical to SEQ ID NO: 27183
  source 1..103: mol_type = other RNA
  modified_base 1: mod_base = OTHER; note = 2'-O-methyl modified nucleotide with phosphorothioate linkage
  modified_base 2: mod_base = OTHER; note = 2'-O-methyl modified nucleotide with phosphorothioate linkage
  modified_base 3: mod_base = OTHER; note = 2'-O-methyl modified nucleotide with phosphorothioate linkage
  modified_base 100: mod_base = OTHER; note = Nucleotide with phosphorothioate linkage
  modified_base 101: mod_base = OTHER; note = 2'-O-methyl modified nucleotide with phosphorothioate linkage
  modified_base 102: mod_base = OTHER; note = 2'-O-methyl modified nucleotide with phosphorothioate linkage
  modified_base 103: mod_base = OTHER; note = 2'-O-methyl modified nucleotide

SEQ ID NO: 29637 - RNA, 102 nt, synthetic construct; identical to SEQ ID NO: 27184
  source 1..102: mol_type = other RNA
  modified_base 1: mod_base = OTHER; note = 2'-O-methyl modified nucleotide with phosphorothioate linkage
  modified_base 2: mod_base = OTHER; note = 2'-O-methyl modified nucleotide with phosphorothioate linkage
  modified_base 3: mod_base = OTHER; note = 2'-O-methyl modified nucleotide with phosphorothioate linkage
  modified_base 99: mod_base = OTHER; note = Nucleotide with phosphorothioate linkage
  modified_base 100: mod_base = OTHER; note = 2'-O-methyl modified nucleotide with phosphorothioate linkage
  modified_base 101: mod_base = OTHER; note = 2'-O-methyl modified nucleotide with phosphorothioate linkage
  modified_base 102: mod_base = OTHER; note = 2'-O-methyl modified nucleotide

SEQ ID NO: 29638 - RNA, 101 nt, synthetic construct; identical to SEQ ID NO: 28390
  source 1..101: mol_type = other RNA
  modified_base 1: mod_base = OTHER; note = 2'-O-methyl modified nucleotide with phosphorothioate linkage
  modified_base 2: mod_base = OTHER; note = 2'-O-methyl modified nucleotide with phosphorothioate linkage
  modified_base 3: mod_base = OTHER; note = 2'-O-methyl modified nucleotide with phosphorothioate linkage
  modified_base 98: mod_base = OTHER; note = Nucleotide with phosphorothioate linkage
  modified_base 99: mod_base = OTHER; note = 2'-O-methyl modified nucleotide with phosphorothioate linkage
  modified_base 100: mod_base = OTHER; note = 2'-O-methyl modified nucleotide with phosphorothioate linkage
  modified_base 101: mod_base = OTHER; note = 2'-O-methyl modified nucleotide

SEQ ID NO: 29639 - RNA, 100 nt, synthetic construct; identical to SEQ ID NO: 28391
  source 1..100: mol_type = other RNA
  modified_base 1: mod_base = OTHER; note = 2'-O-methyl modified nucleotide with phosphorothioate linkage
  modified_base 2: mod_base = OTHER; note = 2'-O-methyl modified nucleotide with phosphorothioate linkage
  modified_base 3: mod_base = OTHER; note = 2'-O-methyl modified nucleotide with phosphorothioate linkage
  modified_base 97: mod_base = OTHER; note = Nucleotide with phosphorothioate linkage
  modified_base 98: mod_base = OTHER; note = 2'-O-methyl modified nucleotide with phosphorothioate linkage
  modified_base 99: mod_base = OTHER; note = 2'-O-methyl modified nucleotide with phosphorothioate linkage
  modified_base 100: mod_base = OTHER; note = 2'-O-methyl modified nucleotide

SEQ ID NO: 29640 - RNA, 93 nt, synthetic construct; identical to SEQ ID NO: 28229
  source 1..93: mol_type = other RNA

SEQ ID NO: 29641 - RNA, 92 nt, synthetic construct; identical to SEQ ID NO: 28230
  source 1..92: mol_type = other RNA

SEQ ID NO: 29642 - RNA, 91 nt, synthetic construct; identical to SEQ ID NO: 28231
  source 1..91: mol_type = other RNA

SEQ ID NO: 29643 - RNA, 90 nt, synthetic construct; identical to SEQ ID NO: 28232
  source 1..90: mol_type = other RNA

SEQ ID NO: 29644 - RNA, 89 nt, synthetic construct; identical to SEQ ID NO: 28233
  source 1..89: mol_type = other RNA

SEQ ID NO: 29645 - RNA, 88 nt, synthetic construct; identical to SEQ ID NO: 28234
  source 1..88: mol_type = other RNA

SEQ ID NO: 29646 - RNA, 87 nt, synthetic construct; identical to SEQ ID NO: 28235
  source 1..87: mol_type = other RNA

SEQ ID NO: 29647 - RNA, 94 nt, synthetic construct; identical to SEQ ID NO: 28241
  source 1..94: mol_type = other RNA

SEQ ID NO: 29648 - RNA, 93 nt, synthetic construct; identical to SEQ ID NO: 27145
  source 1..93: mol_type = other RNA

SEQ ID NO: 29649 - RNA, 92 nt, synthetic construct; identical to SEQ ID NO: 27146
  source 1..92: mol_type = other RNA

SEQ ID NO: 29650 - RNA, 91 nt, synthetic construct; identical to SEQ ID NO: 27147
  source 1..91: mol_type = other RNA

SEQ ID NO: 29651 - RNA, 90 nt, synthetic construct; identical to SEQ ID NO: 27148
  source 1..90: mol_type = other RNA

SEQ ID NO: 29652 - RNA, 89 nt, synthetic construct; identical to SEQ ID NO: 27149
  source 1..89: mol_type = other RNA

SEQ ID NO: 29653 - RNA, 88 nt, synthetic construct; identical to SEQ ID NO: 27150
  source 1..88: mol_type = other RNA

SEQ ID NO: 29654 - RNA, 95 nt, synthetic construct; identical to SEQ ID NO: 27151
  source 1..95: mol_type = other RNA

SEQ ID NO: 29655 - RNA, 94 nt, synthetic construct; identical to SEQ ID NO: 27152
  source 1..94: mol_type = other RNA

SEQ ID NO: 29656 - RNA, 93 nt, synthetic construct; identical to SEQ ID NO: 27153
  source 1..93: mol_type = other RNA

SEQ ID NO: 29657 - RNA, 92 nt, synthetic construct; identical to SEQ ID NO: 27154
  source 1..92: mol_type = other RNA

SEQ ID NO: 29658 - RNA, 91 nt, synthetic construct; identical to SEQ ID NO: 27155
  source 1..91: mol_type = other RNA

SEQ ID NO: 29659 - RNA, 90 nt, synthetic construct; identical to SEQ ID NO: 27156
  source 1..90: mol_type = other RNA

SEQ ID NO: 29660 - RNA, 89 nt, synthetic construct; identical to SEQ ID NO: 27131
  source 1..89: mol_type = other RNA

SEQ ID NO: 29661 - RNA, 96 nt, synthetic construct; identical to SEQ ID NO: 28265
  source 1..96: mol_type = other RNA

SEQ ID NO: 29662 - RNA, 95 nt, synthetic construct; identical to SEQ ID NO: 27158
  source 1..95: mol_type = other RNA

SEQ ID NO: 29663 - RNA, 94 nt, synthetic construct; identical to SEQ ID NO: 27159
  source 1..94: mol_type = other RNA

SEQ ID NO: 29664 - RNA, 93 nt, synthetic construct; identical to SEQ ID NO: 27091
  source 1..93: mol_type = other RNA

SEQ ID NO: 29665 - RNA, 92 nt, synthetic construct; identical to SEQ ID NO: 27001
  source 1..92: mol_type = other RNA

SEQ ID NO: 29666 - RNA, 91 nt, synthetic construct; identical to SEQ ID NO: 27162
  source 1..91: mol_type = other RNA

SEQ ID NO: 29667 - RNA, 90 nt, synthetic construct; identical to SEQ ID NO: 27163
  source 1..90: mol_type = other RNA

SEQ ID NO: 29668 - RNA, 97 nt, synthetic construct; identical to SEQ ID NO: 27164
  source 1..97: mol_type = other RNA

SEQ ID NO: 29669 - RNA, 96 nt, synthetic construct; identical to SEQ ID NO: 27165
  source 1..96: mol_type = other RNA

SEQ ID NO: 29670 - RNA, 95 nt, synthetic construct; identical to SEQ ID NO: 27166
  source 1..95: mol_type = other RNA

SEQ ID NO: 29671 - RNA, 94 nt, synthetic construct; identical to SEQ ID NO: 27167
  source 1..94: mol_type = other RNA

SEQ ID NO: 29672 - RNA, 93 nt, synthetic construct; identical to SEQ ID NO: 27168
  source 1..93: mol_type = other RNA

SEQ ID NO: 29673 - RNA, 92 nt, synthetic construct; identical to SEQ ID NO: 27169
  source 1..92: mol_type = other RNA

SEQ ID NO: 29674 - RNA, 91 nt, synthetic construct; identical to SEQ ID NO: 27170
  source 1..91: mol_type = other RNA

SEQ ID NO: 29675 - RNA, 98 nt, synthetic construct; identical to SEQ ID NO: 28289
  source 1..98: mol_type = other RNA

SEQ ID NO: 29676 - RNA, 97 nt, synthetic construct; identical to SEQ ID NO: 28290
  source 1..97: mol_type = other RNA

SEQ ID NO: 29677 - RNA, 96 nt, synthetic construct; identical to SEQ ID NO: 28291
  source 1..96: mol_type = other RNA

SEQ ID NO: 29678 - RNA, 95 nt, synthetic construct; identical to SEQ ID NO: 28292
  source 1..95: mol_type = other RNA

SEQ ID NO: 29679 - RNA, 94 nt, synthetic construct; identical to SEQ ID NO: 27171
  source 1..94: mol_type = other RNA

SEQ ID NO: 29680 - RNA, 93 nt, synthetic construct; identical to SEQ ID NO: 27172
  source 1..93: mol_type = other RNA

SEQ ID NO: 29681 - RNA, 92 nt, synthetic construct; identical to SEQ ID NO: 27173
  source 1..92: mol_type = other RNA

SEQ ID NO: 29682 - RNA, 99 nt, synthetic construct; identical to SEQ ID NO: 28301
  source 1..99: mol_type = other RNA

SEQ ID NO: 29683 - RNA, 98 nt, synthetic construct; identical to SEQ ID NO: 28302
  source 1..98: mol_type = other RNA

SEQ ID NO: 29684 - RNA, 97 nt, synthetic construct; identical to SEQ ID NO: 28303
  source 1..97: mol_type = other RNA

SEQ ID NO: 29685 - RNA, 96 nt, synthetic construct; identical to SEQ ID NO: 28304
  source 1..96: mol_type = other RNA

SEQ ID NO: 29686 - RNA, 95 nt, synthetic construct; identical to SEQ ID NO: 27174
  source 1..95: mol_type = other RNA

SEQ ID NO: 29687 - RNA, 94 nt, synthetic construct; identical to SEQ ID NO: 27175
  source 1..94: mol_type = other RNA

SEQ ID NO: 29688 - RNA, 93 nt, synthetic construct; identical to SEQ ID NO: 27176
  source 1..93: mol_type = other RNA

SEQ ID NO: 29689 - RNA, 100 nt, synthetic construct; identical to SEQ ID NO: 28313
  source 1..100: mol_type = other RNA

SEQ ID NO: 29690 - RNA, 99 nt, synthetic construct; identical to SEQ ID NO: 28314
  source 1..99: mol_type = other RNA

SEQ ID NO: 29691 - RNA, 98 nt, synthetic construct; identical to SEQ ID NO: 28315
  source 1..98: mol_type = other RNA

SEQ ID NO: 29692 - RNA, 97 nt, synthetic construct; identical to SEQ ID NO: 28316
  source 1..97: mol_type = other RNA

SEQ ID NO: 29693 - RNA, 96 nt, synthetic construct; identical to SEQ ID NO: 27133
  source 1..96: mol_type = other RNA

SEQ ID NO: 29694 - RNA, 95 nt, synthetic construct; identical to SEQ ID NO: 27178
  source 1..95: mol_type = other RNA

SEQ ID NO: 29695 - RNA, 94 nt, synthetic construct; identical to SEQ ID NO: 27179
  source 1..94: mol_type = other RNA

SEQ ID NO: 29696 - RNA, 101 nt, synthetic construct; identical to SEQ ID NO: 28325
  source 1..101: mol_type = other RNA

SEQ ID NO: 29697 - RNA, 100 nt, synthetic construct; identical to SEQ ID NO: 28326
  source 1..100: mol_type = other RNA

SEQ ID NO: 29698 - RNA, 99 nt, synthetic construct; identical to SEQ ID NO: 28327
  source 1..99: mol_type = other RNA

SEQ ID NO: 29699 - RNA, 98 nt, synthetic construct; identical to SEQ ID NO: 28328
  source 1..98: mol_type = other RNA

SEQ ID NO: 29700 - RNA, 97 nt, synthetic construct; identical to SEQ ID NO: 28329
  source 1..97: mol_type = other RNA

SEQ ID NO: 29701 - RNA, 96 nt, synthetic construct; identical to SEQ ID NO: 28330
  source 1..96: mol_type = other RNA

SEQ ID NO: 29702 - RNA, 95 nt, synthetic construct; identical to SEQ ID NO: 28331
  source 1..95: mol_type = other RNA

SEQ ID NO: 29703 - RNA, 102 nt, synthetic construct; identical to SEQ ID NO: 28337
  source 1..102: mol_type = other RNA

SEQ ID NO: 29704 - RNA, 101 nt, synthetic construct; identical to SEQ ID NO: 28338
  source 1..101: mol_type = other RNA

SEQ ID NO: 29705 - RNA, 100 nt, synthetic construct; identical to SEQ ID NO: 28339
  source 1..100: mol_type = other RNA

SEQ ID NO: 29706 - RNA, 99 nt, synthetic construct; identical to SEQ ID NO: 28340
  source 1..99: mol_type = other RNA

SEQ ID NO: 29707 - RNA, 98 nt, synthetic construct; identical to SEQ ID NO: 27180
  source 1..98: mol_type = other RNA

SEQ ID NO: 29708 - RNA, 97 nt, synthetic construct; identical to SEQ ID NO: 28342
  source 1..97: mol_type = other RNA

SEQ ID NO: 29709 - RNA, 96 nt, synthetic construct; identical to SEQ ID NO: 28343
  source 1..96: mol_type = other RNA

SEQ ID NO: 29710 - RNA, 104 nt, synthetic construct; identical to SEQ ID NO: 28361
  source 1..104: mol_type = other RNA

SEQ ID NO: 29711 - RNA, 103 nt, synthetic construct; identical to SEQ ID NO: 28362
  source 1..103: mol_type = other RNA

SEQ ID NO: 29712 - RNA, 102 nt, synthetic construct; identical to SEQ ID NO: 28363
  source 1..102: mol_type = other RNA

SEQ ID NO: 29713 - RNA, 101 nt, synthetic construct; identical to SEQ ID NO: 27181
  source 1..101: mol_type = other RNA

SEQ ID NO: 29714 - RNA, 100 nt, synthetic construct; identical to SEQ ID NO: 27182
  source 1..100: mol_type = other RNA

SEQ ID NO: 29715 - RNA, 99 nt, synthetic construct; identical to SEQ ID NO: 28366
  source 1..99: mol_type = other RNA

SEQ ID NO: 29716 - RNA, 98 nt, synthetic construct; identical to SEQ ID NO: 28367
  source 1..98: mol_type = other RNA

SEQ ID NO: 29717 - RNA, 106 nt, synthetic construct; identical to SEQ ID NO: 28385
  source 1..106: mol_type = other RNA

SEQ ID NO: 29718 - RNA, 105 nt, synthetic construct; identical to SEQ ID NO: 28386
  source 1..105: mol_type = other RNA

SEQ ID NO: 29719 - RNA, 104 nt, synthetic construct; identical to SEQ ID NO: 28387
  source 1..104: mol_type = other RNA

SEQ ID NO: 29720 - RNA, 103 nt, synthetic construct; identical to SEQ ID NO: 27183
  source 1..103: mol_type = other RNA

SEQ ID NO: 29721 - RNA, 102 nt, synthetic construct; identical to SEQ ID NO: 27184
  source 1..102: mol_type = other RNA

SEQ ID NO: 29722 - RNA, 101 nt, synthetic construct; identical to SEQ ID NO: 28390
  source 1..101: mol_type = other RNA

SEQ ID NO: 29723 - RNA, 100 nt, synthetic construct; identical to SEQ ID NO: 28391
  source 1..100: mol_type = other RNA

SEQ ID NO: 29724 - RNA, 122 nt, synthetic construct
  source 1..122: mol_type = other RNA
aaggctgtgctgaccatcgagtctttgtactctggtaccagaagctacaaagataaggcttcatgccgaaatcaacaccctgtcattttatggcagggtgtttttcttgtcgatggtcagca

SEQ ID NO: 29725 - RNA, 92 nt, synthetic construct
  source 1..92: mol_type = other RNA
aaggctgtgctgaccatcgagtctttgtactctggtaccagaagctacaaagataaggcttcatgccgaaatcatcttgtcgatggtcagca

SEQ ID NO: 29726 - RNA, 98 nt, synthetic construct
  source 1..98: mol_type = other RNA
aaggctgtgctgaccatcgagtctttgtactctggtaccagaagctacaaagataaggcttcatgccgaaatcaagtccctttcttgtcgatggtcag

SEQ ID NO: 29727 - RNA, 5911 nt, synthetic construct
  source 1..5911: mol_type = other RNA
aggaaataagagagaaaagaagagtaagaagaaatataagagccaccatgcccgcagcaaagcgggttaagctggacggaggcagcgacctagtactaggactggatatcggaataggcagcgtgggcgtgggcatcctgaataaggtgaccggcgaaatcatccacaagaacagccggatctttcccgcagctcaagccgaaaataacctggtgcggcggacaaacagacagggacggagattagccagacggaaaaaacaccggcgggttcggctgaacagactcttcgaggagagcggcttgataacagacttcaccaagatcagcatcaacctgaacccctatcagctgcgggtgaaaggcctaacagacgagctgagcaacgaggaactgttcatagccctgaagaacatggtgaagcaccggggcatatcatacctggatgacgccagcgacgacggaaacagcagtgtaggagattacgcccagatcgtgaaggagaacagcaagcagctggaaaccaagacccccggacagatccaactagagcggtaccaaacctacggccagctaaggggcgacttcaccgtagagaaggacggcaagaagcacagactgatcaacgtgtttcccacaagcgcctacagaagcgaggccctacgtatcctgcaaacccagcaggagttcaacccccagatcaccgacgagttcatcaaccggtacctagagatcctgacaggcaagcggaaatactaccacggccccggaaacgaaaagtctcggacagactacggtcggtacaggaccagcggcgaaaccttggacaacatcttcggcatcctcatcggcaagtgcaccttctaccctgacgagttcagagccgccaaggcctcatacaccgctcaggagttcaacctgctgaacgacctgaacaacctgaccgtgcctaccgagactaagaagctgagcaaggagcagaagaaccagatcatcaactacgtgaagaacgagaaggccatgggccctgctaagctgttcaagtacatagccaagctactgagctgcgacgtggccgacataaagggctaccggatcgacaaaagcggaaaggccgagatccacaccttcgaggcctaccggaagatgaaaaccctggaaaccctggacatagagcagatggaccgggaaaccctggacaagctggcctacgtactgaccctaaacaccgaacgtgagggaatccaggaagccttagagcacgaattcgccgacggcagcttcagccaaaagcaggtagacgagctggtgcaattccggaaggcaaacagcagcatcttcggcaagggctggcacaacttcagcgtgaagctgatgatggagctgatccccgagctgtacgaaaccagcgaggaacaaatgaccatcctgacccggctgggcaagcagaaaaccaccagcagctccaacaagaccaagtacatcgacgagaagctgctgaccgaggagatctacaaccccgtagtggcaaagagcgttcggcaggccatcaagatcgtaaacgccgccatcaaggagtacggcgacttcgacaacatcgtgatcgagatggcccgggagacaaacgaggacgacgagaagaaggccatccagaagatccagaaggccaacaaggacgagaaggacgctgccatgctgaaagccgcaaaccaatacaacggcaaggccgaactgccccacagcgtgttccacggacacaaacaactagcaaccaaaatccggctgtggcaccagcagggcgagagatgcctgtacacaggaaaaaccatcagcatccacgacctgatcaacaacagcaaccagttcgaggtggaccacatcctgccactgagcatcacattcgacgacagcctggccaacaaagtgctggtttacgcaacagccgcacaggaaaagggccagcgtaccccataccaagcactagacagcatggacgacgcttggagcttccgggagctaaaggccttcgtgagagagagcaagaccctgagcaacaagaagaaggagtacctgctgaccgaggaggacatcagcaagttcgacgtgcggaagaagttcatcgagaggaacctggtggacacaagatatgccagccgggtggtgctgaatgccctacaggagcacttcagagcacacaagatcgacaccaaggtaagcgtagtccggggacagttcacaagccaactacggaggcactggggaatcgaaaaaacacgggacacctaccaccaccacgcagtggatgcgctaataatcgcagccagcagccagctgaacctgtggaagaagcagaagaacaccctagtgagctacagcgaggaccagctgctggacatcgaaaccggagagctgattagcgacgacgagtacaaggagagcgtgttcaaggctccctaccagcacttcgtggacaccctaaagagcaaggagttcgaggacagcatcctgttcagctaccaggtggacagcaagttcaaccggaagatcagcgacgccaccatatacgcaaccaggcaggccaaagtgggcaaagacaaggccgacgaaacctacgtgctaggcaagatcaaggacatctacacccaggacgggtacgacgccttcatgaagatctacaagaaggacaagagcaagttcctgatgtaccggcacgaccctcagaccttcgagaaggtgatcgagcccatcttggagaactaccccaacaagcagatcaacgagaagggcaaggaggtgccctgcaaccccttcctgaagtacaaggaagaacacggctacatccggaagtacagcaagaagggcaacggccccgagatcaagagcctgaagtactacgacagcaagctgggcaaccacatcgacatcacccccaaggacagcaacaacaaagtggtgctgcagagcgtgagcccatggagagctgacgtgtacttcaacaagaccaccggcaagtacgagatcctaggcctgaagtacgcagacctgcagttcgagaagggaaccggcacctacaagatcagccaggagaagtacaacgacatcaagaagaaggagggcgtggacagcgacagcgagttcaagttcaccctgtacaagaacgacctgctgctggtgaaggacaccgaaaccaaggagcagcagctgtttcggttcctgtcacggaccatgcccaagcagaagcactacgtggagctgaagccctacgacaagcagaagttcgaaggcggcgaggcattgatcaaggtactaggcaatgtggccaacagcggccagtgcaaaaagggcctgggcaagagcaacatcagcatctacaaggtgcggaccgacgtgttgggcaaccaacacatcatcaagaacgagggcgacaagccaaaactagacttcagcggcggcagcagcggcggcagcagcggcagcgagacccccggcaccagcgagagcgccacccccgagagcagcggcggcagcagcggcggcagcagcaccctgaacatcgaggacgagtaccggctgcacgagaccagcaaggagccagacgtgagcctgggcagcacctggctgagcgacttcccccaggcctgggccgagaccggcggcatgggcctggccgtgcggcaggcccccctgatcatccccctgaaggccaccagcacccccgtgagcatcaagcagtaccccatgagccaggaggcccggctgggcatcaagccccacatccagcggctgctggaccagggcatcctggtgccctgccagagcccctggaacacccctctgctgcccgtgaagaagcccggcaccaacgactaccggcccgtgcaggacctgcgggaggtgaacaagcgggtggaggacatccaccccaccgtgcctaacccatacaacctgctgagcggcctgccccccagccaccagtggtacaccgtgctggacctgaaggacgccttcttctgcctgcggctgcaccccaccagccagcccctgttcgccttcgagtggcgggaccccgagatgggcatcagcggccagctgacctggacccggctgccccagggcttcaagaacagccccaccctgttcaacgaggccctgcaccgggacctggccgacttccggatccagcaccccgacctgatcctgctgcagtacgtggacgacctgctgctggccgccaccagcgagctggactgccagcagggcacccgggccctgctgcagaccctgggcaacctgggctaccgggccagcgccaagaaggcccagatctgccagaagcaggtgaagtacctgggctacctgctgaaggagggccagcggtggctgaccgaggcccggaaggagaccgtgatgggccagcccacccccaagaccccccggcagctgcgggagttcctgggcaaggccggcttctgccggctgttcatccccggcttcgccgagatggccgcccctctgtaccccctgaccaagccaggcaccctgttcaactggggccccgaccagcagaaggcctaccaggagatcaagcaggccctgctgaccgcccccgccctgggcctgcccgacctgaccaagcctttcgagctgttcgtggacgagaagcagggctacgccaagggcgtgctgacccagaagctgggcccatggcggcggcccgtggcctacctgagcaagaagctggaccccgtggccgccggctggcccccctgcctgcggatggtggccgccatcgccgtgctgaccaaggacgccggcaagctgaccatgggccagcccctggtgatcctggccccccacgccgtggaggccctggtgaagcagccccccgaccggtggctgagcaacgcccggatgacccactaccaggccctgctgctggacaccgaccgggtgcagttcggccccgtggtggccctgaaccccgccaccctgctgcctctgcccgaggagggcctgcagcacaactgcctggacatcctggccgaggcccacggcacccggcccgacctgaccgaccagcctctgcctgacgccgaccacacctggtacaccgacggcagcagcctgctgcaggagggccagcggaaggccggcgccgccgtgaccaccgagaccgaggtgatctgggccaaggccctgcccgccggcaccagcgcccagcgggccgagctgatcgccctgacccaggccctgaagatggccgagggcaagaagctgaacgtgtacaccgacagccggtacgccttcgccaccgcccacatccacggcgagatctaccggcggcggggctggctgaccagcgagggcaaggagatcaagaacaaggacgagatcctggccctgctgaaggccctgttcctgcccaagcggctgagcatcatccactgccccggccaccagaagggccacagcgccgaggcccggggcaaccggatggccgaccaggccgcccggaaggccgccatcaccgagacccccgacaccagcaccctgctgatcgagaacagcagcccaagcggcggcagcaagagaaccgctgacggctcagaattcgagaagcggaccgctgacggctccgagttcgagagcccgaaaaagaaagccaaggtagagtaatagtgagctggagcctcggtggccatgcttcttgccccttgggcctccccccagcccctcctccccttcctgcacccgtacccccgtggtctttgaataaagtctgaaaaaaaaaaaaaaaattaaaaaaaaaaaaaaaaaaaaaaaaatttaaaaaaaaaaaaaaaaaaaaaaaaaaaaaaaaaatttttaaaaaaaaaaaaaaaaaaaaaaaaaaaaaaaaaaaaaaaaaaaaa

SEQ ID NO: 29728 - protein, 1849 aa, synthetic construct
MPAAKRVKLDGGSDLVLGLDIGIGSVGVGILNKVTGEIIHKNSRIFPAAQAENNLVRRTNRQGRRLARRKKHRRVRLNRLFEESGLITDFTKISINLNPYQLRVKGLTDELSNEELFIALKNMVKHRGISYLDDASDDGNSSVGDYAQIVKENSKQLETKTPGQIQLERYQTYGQLRGDFTVEKDGKKHRLINVFPTSAYRSEALRILQTQQEFNPQITDEFINRYLEILTGKRKYYHGPGNEKSRTDYGRYRTSGETLDNIFGILIGKCTFYPDEFRAAKASYTAQEFNLLNDLNNLTVPTETKKLSKEQKNQIINYVKNEKAMGPAKLFKYIAKLLSCDVADIKGYRIDKSGKAEIHTFEAYRKMKTLETLDIEQMDRETLDKLAYVLTLNTEREGIQEALEHEFADGSFSQKQVDELVQFRKANSSIFGKGWHNFSVKLMMELIPELYETSEEQMTILTRLGKQKTTSSSNKTKYIDEKLLTEEIYNPVVAKSVRQAIKIVNAAIKEYGDFDNIVIEMARETNEDDEKKAIQKIQKANKDEKDAAMLKAANQYNGKAELPHSVFHGHKQLATKIRLWHQQGERCLYTGKTISIHDLINNSNQFEVDHILPLSITFDDSLANKVLVYATAAQEKGQRTPYQALDSMDDAWSFRELKAFVRESKTLSNKKKEYLLTEEDISKFDVRKKFIERNLVDTRYASRVVLNALQEHFRAHKIDTKVSVVRGQFTSQLRRHWGIEKTRDTYHHHAVDALIIAASSQLNLWKKQKNTLVSYSEDQLLDIETGELISDDEYKESVFKAPYQHFVDTLKSKEFEDSILFSYQVDSKFNRKISDATIYATRQAKVGKDKADETYVLGKIKDIYTQDGYDAFMKIYKKDKSKFLMYRHDPQTFEKVIEPILENYPNKQINEKGKEVPCNPFLKYKEEHGYIRKYSKKGNGPEIKSLKYYDSKLGNHIDITPKDSNNKVVLQSVSPWRADVYFNKTTGKYEILGLKYADLQFEKGTGTYKISQEKYNDIKKKEGVDSDSEFKFTLYKNDLLLVKDTETKEQQLFRFLSRTMPKQKHYVELKPYDKQKFEGGEALIKVLGNVANSGQCKKGLGKSNISIYKVRTDVLGNQHIIKNEGDKPKLDFGGWQAAESYEVGGTAPLEEEYRLFLEAPIQNVTLLEQWKREIPKVWAEINPPGLASTQAPIHVQLLSTALPVRVRQYPITLEAKRSLRETIRKFRAAGILRPVHSPWNTPLLPVRKSGTSEYRMVQDLREVNKRVETIHPTVPNPYTLLSLLPPDRIWYSVLDLKDAFFCIPLAPESQLIFAFEWADAEEGESGQLTWTRLPQGFKNSPTLFNEALNRDLQGFRLDHPSVSLLQYVDDLLIAADTQAACLSATRDLLMTLAELGYRVSGKKAQLCQEEVTYLGFKIHKGSRSLSNSRTQAILQIPVPKTKRQVREFLGKIGYCRLFIPGFAELAQPLYAATRPGNDPLVWGEKEEEAFQSLKLALTQPPALALPSLDKPFQLFVEETSGAAKGVLTQALGPWKRPVAYLSKRLDPVAAGWPRCLRAIAAAALLTREASKLTFGQDIEITSSHNLESLLRSPPDKWLTNARITQYQVLLLDPPRVRFKQTAALNPATLLPETDDTLPIHHCLDTLDSLTSTRPDLTDQPLAQAEATLFTDGSSYIRDGKRYAGAAVVTLDSVIWAEPLPIGTSAQKAELIALTKALEWSKDKSVNIYTDSRYAFATLHVHGMIYRERGWLTAGGKAIKNAPEILALLTAVWLPKRVAVMHCKGHQKDDAPTSTGNRRADEVAREVAIRPLSTQATISAGKRTADGSEFEKRTADGSEFESPKKKAKVE

SEQ ID NO: 29729 - RNA, 100 nt, synthetic construct; identical to SEQ ID NO: 27143
  source 1..100: mol_type = other RNA
  modified_base 1: mod_base = OTHER; note = 2'-O-methyl modified nucleotide with phosphorothioate linkage
  modified_base 2: mod_base = OTHER; note = 2'-O-methyl modified nucleotide with phosphorothioate linkage
  modified_base 3: mod_base = OTHER; note = 2'-O-methyl modified nucleotide with phosphorothioate linkage
  modified_base 32: mod_base = OTHER; note = 2'-O-methyl modified nucleotide
  modified_base 33: mod_base = OTHER; note = 2'-O-methyl modified nucleotide
  modified_base 34: mod_base = OTHER; note = 2'-O-methyl modified nucleotide
  modified_base 35: mod_base = OTHER; note = 2'-O-methyl modified nucleotide
  modified_base 36: mod_base = OTHER; note = 2'-O-methyl modified nucleotide
  modified_base 37: mod_base = OTHER; note = 2'-O-methyl modified nucleotide
  modified_base 38: mod_base = OTHER; note = 2'-O-methyl modified nucleotide
  modified_base 39: mod_base = OTHER; note = 2'-O-methyl modified nucleotide
  modified_base 40: mod_base = OTHER; note = 2'-O-methyl modified nucleotide
  modified_base 41: mod_base = OTHER; note = 2'-O-methyl modified nucleotide
  modified_base 42: mod_base = OTHER; note = 2'-O-methyl modified nucleotide
  modified_base 43: mod_base = OTHER; note = 2'-O-methyl modified nucleotide
  modified_base 44: mod_base = OTHER; note = 2'-O-methyl modified nucleotide
  modified_base 45: mod_base = OTHER; note = 2'-O-methyl modified nucleotide
  modified_base 46: mod_base = OTHER; note = 2'-O-methyl modified nucleotide
  modified_base 47: mod_base = OTHER; note = 2'-O-methyl modified nucleotide
  modified_base 48: mod_base = OTHER; note = 2'-O-methyl modified nucleotide
  modified_base 49: mod_base = OTHER; note = 2'-O-methyl modified nucleotide
  modified_base 62: mod_base = OTHER; note = 2'-O-methyl modified nucleotide
  modified_base 63: mod_base = OTHER; note = 2'-O-methyl modified nucleotide
  modified_base 64: mod_base = OTHER; note = 2'-O-methyl modified nucleotide
  modified_base 65: mod_base = OTHER; note = 2'-fluoro modified nucleotide
  modified_base 66: mod_base = OTHER; note = 2'-fluoro modified nucleotide
  modified_base 67: mod_base = OTHER; note = 2'-fluoro modified nucleotide
  modified_base 68: mod_base = OTHER; note = 2'-fluoro modified nucleotide
  modified_base 69: mod_base = OTHER; note = 2'-fluoro modified nucleotide
  modified_base 70: mod_base = OTHER; note = 2'-fluoro modified nucleotide
  modified_base 73: mod_base = OTHER; note = 2'-fluoro modified nucleotide
  modified_base 74: mod_base = OTHER; note = 2'-fluoro modified nucleotide
  modified_base 75: mod_base = OTHER; note = 2'-fluoro modified nucleotide
  modified_base 80: mod_base = OTHER; note = 2'-fluoro modified nucleotide
  modified_base 81: mod_base = OTHER; note = 2'-fluoro modified nucleotide
  modified_base 82: mod_base = OTHER; note = 2'-fluoro modified nucleotide
  modified_base 97: mod_base = OTHER; note = Nucleotide with phosphorothioate linkage
  modified_base 98: mod_base = OTHER; note = 2'-O-methyl modified nucleotide with phosphorothioate linkage
  modified_base 99: mod_base = OTHER; note = 2'-O-methyl modified nucleotide with phosphorothioate linkage
  modified_base 100: mod_base = OTHER; note = 2'-O-methyl modified nucleotide

SEQ ID NO: 29730 - RNA, 101 nt, synthetic construct
  source 1..101: mol_type = other RNA
  modified_base 1: mod_base = OTHER; note = 2'-O-methyl modified nucleotide with phosphorothioate linkage
  modified_base 2: mod_base = OTHER; note = 2'-O-methyl modified nucleotide with phosphorothioate linkage
  modified_base 3: mod_base = OTHER; note = 2'-O-methyl modified nucleotide with phosphorothioate linkage
  modified_base 33: mod_base = OTHER; note = 2'-O-methyl modified nucleotide
  modified_base 34: mod_base = OTHER; note = 2'-O-methyl modified nucleotide
  modified_base 35: mod_base = OTHER; note = 2'-O-methyl modified nucleotide
  modified_base 36: mod_base = OTHER; note = 2'-O-methyl modified nucleotide
  modified_base 37: mod_base = OTHER; note = 2'-O-methyl modified nucleotide
  modified_base 38: mod_base = OTHER; note = 2'-O-methyl modified nucleotide
  modified_base 39: mod_base = OTHER; note = 2'-O-methyl modified nucleotide
  modified_base 40: mod_base = OTHER; note = 2'-O-methyl modified nucleotide
  modified_base 41: mod_base = OTHER; note = 2'-O-methyl modified nucleotide
  modified_base 42: mod_base = OTHER; note = 2'-O-methyl modified nucleotide
  modified_base 43: mod_base = OTHER; note = 2'-O-methyl modified nucleotide
  modified_base 44: mod_base = OTHER; note = 2'-O-methyl modified nucleotide
  modified_base 45: mod_base = OTHER; note = 2'-O-methyl modified nucleotide
  modified_base 46: mod_base = OTHER; note = 2'-O-methyl modified nucleotide
  modified_base 47: mod_base = OTHER; note = 2'-O-methyl modified nucleotide
  modified_base 48: mod_base = OTHER; note = 2'-O-methyl modified nucleotide
  modified_base 49: mod_base = OTHER; note = 2'-O-methyl modified nucleotide
  modified_base 50: mod_base = OTHER; note = 2'-O-methyl modified nucleotide
  modified_base 63: mod_base = OTHER; note = 2'-O-methyl modified nucleotide
  modified_base 64: mod_base = OTHER; note = 2'-O-methyl modified nucleotide
  modified_base 65: mod_base = OTHER; note = 2'-O-methyl modified nucleotide
  modified_base 66: mod_base = OTHER; note = 2'-fluoro modified nucleotide
  modified_base 67: mod_base = OTHER; note = 2'-fluoro modified nucleotide
  modified_base 68: mod_base = OTHER; note = 2'-fluoro modified nucleotide
  modified_base 69: mod_base = OTHER; note = 2'-fluoro modified nucleotide
  modified_base 70: mod_base = OTHER; note = 2'-fluoro modified nucleotide
  modified_base 71: mod_base = OTHER; note = 2'-fluoro modified nucleotide
  modified_base 74: mod_base = OTHER; note = 2'-fluoro modified nucleotide
  modified_base 75: mod_base = OTHER; note = 2'-fluoro modified nucleotide
  modified_base 76: mod_base = OTHER; note = 2'-fluoro modified nucleotide
  modified_base 88: mod_base = OTHER; note = 2'-fluoro modified nucleotide
  modified_base 89: mod_base = OTHER; note = 2'-fluoro modified nucleotide
  modified_base 90: mod_base = OTHER; note = 2'-fluoro modified nucleotide
  modified_base 98: mod_base = OTHER; note = Nucleotide with phosphorothioate linkage
  modified_base 99: mod_base = OTHER; note = 2'-O-methyl modified nucleotide with phosphorothioate linkage
  modified_base 100: mod_base = OTHER; note = 2'-O-methyl modified nucleotide with phosphorothioate linkage
  modified_base 101: mod_base = OTHER; note = 2'-O-methyl modified nucleotide
taaggctgtgctgaccatcgagtctttgtactctgggacttcggtcccagaagctacaaagataaggcttcatgccgaaatcatttctcgtcgatggtcag

SEQ ID NO: 29731 - RNA, 101 nt, synthetic construct
  source 1..101: mol_type = other RNA
  modified_base 1: mod_base = OTHER; note = 2'-O-methyl modified nucleotide with phosphorothioate linkage
  modified_base 2: mod_base = OTHER; note = 2'-O-methyl modified nucleotide with phosphorothioate linkage
  modified_base 3: mod_base = OTHER; note = 2'-O-methyl modified nucleotide with phosphorothioate linkage
  modified_base 33: mod_base = OTHER; note = 2'-O-methyl modified nucleotide
  modified_base 34: mod_base = OTHER; note = 2'-O-methyl modified nucleotide
  modified_base 35: mod_base = OTHER; note = 2'-O-methyl modified nucleotide
  modified_base 36: mod_base = OTHER; note = 2'-O-methyl modified nucleotide
  modified_base 37: mod_base = OTHER; note = 2'-O-methyl modified nucleotide
  modified_base 38: mod_base = OTHER; note = 2'-O-methyl modified nucleotide
  modified_base 39: mod_base = OTHER; note = 2'-O-methyl modified nucleotide
  modified_base 40: mod_base = OTHER; note = 2'-O-methyl modified nucleotide
  modified_base 41: mod_base = OTHER; note = 2'-O-methyl modified nucleotide
  modified_base 42: mod_base = OTHER; note = 2'-O-methyl modified nucleotide
  modified_base 43: mod_base = OTHER; note = 2'-O-methyl modified nucleotide
  modified_base 44: mod_base = OTHER; note = 2'-O-methyl modified nucleotide
  modified_base 45: mod_base = OTHER; note = 2'-O-methyl modified nucleotide
  modified_base 46: mod_base = OTHER; note = 2'-O-methyl modified nucleotide
  modified_base 47: mod_base = OTHER; note = 2'-O-methyl modified nucleotide
  modified_base 48: mod_base = OTHER; note = 2'-O-methyl modified nucleotide
  modified_base 49: mod_base = OTHER; note = 2'-O-methyl modified nucleotide
  modified_base 50: mod_base = OTHER; note = 2'-O-methyl modified nucleotide
  modified_base 63: mod_base = OTHER; note = 2'-O-methyl modified nucleotide
  modified_base 64: mod_base = OTHER; note = 2'-O-methyl modified nucleotide
  modified_base 65: mod_base = OTHER; note = 2'-O-methyl modified nucleotide
  modified_base 66: mod_base = OTHER; note = 2'-fluoro modified nucleotide
  modified_base 67: mod_base = OTHER; note = 2'-fluoro modified nucleotide
  modified_base 68: mod_base = OTHER; note = 2'-fluoro modified nucleotide
  modified_base 69: mod_base = OTHER; note = 2'-fluoro modified nucleotide
  modified_base 70: mod_base = OTHER; note = 2'-fluoro modified nucleotide
  modified_base 71: mod_base = OTHER; note = 2'-fluoro modified nucleotide
  modified_base 74: mod_base = OTHER; note = 2'-fluoro modified nucleotide
  modified_base 75: mod_base = OTHER; note = 2'-fluoro modified nucleotide
  modified_base 76: mod_base = OTHER; note = 2'-fluoro modified nucleotide
  modified_base 88: mod_base = OTHER; note = 2'-fluoro modified nucleotide
  modified_base 89: mod_base = OTHER; note = 2'-fluoro modified nucleotide
  modified_base 90: mod_base = OTHER; note = 2'-fluoro modified nucleotide
  modified_base 98: mod_base = OTHER; note = Nucleotide with phosphorothioate linkage
  modified_base 99: mod_base = OTHER; note = 2'-O-methyl modified nucleotide with phosphorothioate linkage
  modified_base 100: mod_base = OTHER; note = 2'-O-methyl modified nucleotide with phosphorothioate linkage
  modified_base 101: mod_base = OTHER; note = 2'-O-methyl modified nucleotide
taaggctgtgctgaccatcgagtcgttgtactctgggacttcggtcccagaagctacaacgataaggcttcatgccgaaatcatttctcgtcgatggtcag

SEQ ID NO: 29732 - RNA, 101 nt, synthetic construct; identical to SEQ ID NO: 29730
  source 1..101: mol_type = other RNA
  modified_base 1: mod_base = OTHER; note = 2'-O-methyl modified nucleotide with phosphorothioate linkage
  modified_base 2: mod_base = OTHER; note = 2'-O-methyl modified nucleotide with phosphorothioate linkage
  modified_base 3: mod_base = OTHER; note = 2'-O-methyl modified nucleotide with phosphorothioate linkage
  modified_base 33: mod_base = OTHER; note = 2'-O-methyl modified nucleotide
  modified_base 34: mod_base = OTHER; note = 2'-O-methyl modified nucleotide
  modified_base 35: mod_base = OTHER; note = 2'-O-methyl modified nucleotide
  modified_base 36: mod_base = OTHER; note = 2'-O-methyl modified nucleotide
  modified_base 37: mod_base = OTHER; note = 2'-O-methyl modified nucleotide
  modified_base 38: mod_base = OTHER; note = 2'-O-methyl modified nucleotide
  modified_base 39: mod_base = OTHER; note = 2'-O-methyl modified nucleotide
  modified_base 40: mod_base = OTHER; note = 2'-O-methyl modified nucleotide
  modified_base 41: mod_base = OTHER; note = 2'-O-methyl modified nucleotide
  modified_base 42: mod_base = OTHER; note = 2'-O-methyl modified nucleotide
  modified_base 43: mod_base = OTHER; note = 2'-O-methyl modified nucleotide
  modified_base 44: mod_base = OTHER; note = 2'-O-methyl modified nucleotide
  modified_base 45: mod_base = OTHER; note = 2'-O-methyl modified nucleotide
  modified_base 46: mod_base = OTHER; note = 2'-O-methyl modified nucleotide
  modified_base 47: mod_base = OTHER; note = 2'-O-methyl modified nucleotide
  modified_base 48: mod_base = OTHER; note = 2'-O-methyl modified nucleotide
  modified_base 49: mod_base = OTHER; note = 2'-O-methyl modified nucleotide
  modified_base 50: mod_base = OTHER; note = 2'-O-methyl modified nucleotide
  modified_base 63: mod_base = OTHER; note = 2'-O-methyl modified nucleotide
  modified_base 64: mod_base = OTHER; note = 2'-O-methyl modified nucleotide
  modified_base 65: mod_base = OTHER; note = 2'-O-methyl modified nucleotide
  modified_base 66: mod_base = OTHER; note = 2'-fluoro modified nucleotide
  modified_base 67: mod_base = OTHER; note = 2'-fluoro modified nucleotide
  modified_base 68: mod_base = OTHER; note = 2'-fluoro modified nucleotide
  modified_base 69: mod_base = OTHER; note = 2'-fluoro modified nucleotide
  modified_base 70: mod_base = OTHER; note = 2'-fluoro modified nucleotide
  modified_base 71: mod_base = OTHER; note = 2'-fluoro modified nucleotide
  modified_base 74: mod_base = OTHER; note = 2'-fluoro modified nucleotide
  modified_base 75: mod_base = OTHER; note = 2'-fluoro modified nucleotide
  modified_base 76: mod_base = OTHER; note = 2'-fluoro modified nucleotide
  modified_base 88: mod_base = OTHER; note = 2'-fluoro modified nucleotide
  modified_base 89: mod_base = OTHER; note = 2'-fluoro modified nucleotide
  modified_base 90: mod_base = OTHER; note = 2'-fluoro modified nucleotide
  modified_base 98: mod_base = OTHER; note = Nucleotide with phosphorothioate linkage
  modified_base 99: mod_base = OTHER; note = 2'-O-methyl modified nucleotide with phosphorothioate linkage
  modified_base 100: mod_base = OTHER; note = 2'-O-methyl modified nucleotide with phosphorothioate linkage
  modified_base 101: mod_base = OTHER; note = 2'-O-methyl modified nucleotide

SEQ ID NO: 29733 - RNA, 101 nt, synthetic construct
  source 1..101: mol_type = other RNA
  modified_base 1: mod_base = OTHER; note = 2'-O-methyl modified nucleotide with phosphorothioate linkage
  modified_base 2: mod_base = OTHER; note = 2'-O-methyl modified nucleotide with phosphorothioate linkage
  modified_base 3: mod_base = OTHER; note = 2'-O-methyl modified nucleotide with phosphorothioate linkage
  modified_base 33: mod_base = OTHER; note = 2'-O-methyl modified nucleotide
  modified_base 34: mod_base = OTHER; note = 2'-O-methyl modified nucleotide
  modified_base 35: mod_base = OTHER; note = 2'-O-methyl modified nucleotide
  modified_base 36: mod_base = OTHER; note = 2'-O-methyl modified nucleotide
  modified_base 37: mod_base = OTHER; note = 2'-O-methyl modified nucleotide
  modified_base 38: mod_base = OTHER; note = 2'-O-methyl modified nucleotide
  modified_base 39: mod_base = OTHER; note = 2'-O-methyl modified nucleotide
  modified_base 40: mod_base = OTHER; note = 2'-O-methyl modified nucleotide
  modified_base 41: mod_base = OTHER; note = 2'-O-methyl modified nucleotide
  modified_base 42: mod_base = OTHER; note = 2'-O-methyl modified nucleotide
  modified_base 43: mod_base = OTHER; note = 2'-O-methyl modified nucleotide
  modified_base 44: mod_base = OTHER; note = 2'-O-methyl modified nucleotide
  modified_base 45: mod_base = OTHER; note = 2'-O-methyl modified nucleotide
  modified_base 46: mod_base = OTHER; note = 2'-O-methyl modified nucleotide
  modified_base 47: mod_base = OTHER; note = 2'-O-methyl modified nucleotide
  modified_base 48: mod_base = OTHER; note = 2'-O-methyl modified nucleotide
  modified_base 49: mod_base = OTHER; note = 2'-O-methyl modified nucleotide
  modified_base 50: mod_base = OTHER; note = 2'-O-methyl modified nucleotide
  modified_base 63: mod_base = OTHER; note = 2'-O-methyl modified nucleotide
  modified_base 64: mod_base = OTHER; note = 2'-O-methyl modified nucleotide
  modified_base 65: mod_base = OTHER; note = 2'-O-methyl modified nucleotide
  modified_base 66: mod_base = OTHER; note = 2'-fluoro modified nucleotide
  modified_base 67: mod_base = OTHER; note = 2'-fluoro modified nucleotide
  modified_base 68: mod_base = OTHER; note = 2'-fluoro modified nucleotide
  modified_base 69: mod_base = OTHER; note = 2'-fluoro modified nucleotide
  modified_base 70: mod_base = OTHER; note = 2'-fluoro modified nucleotide
  modified_base 71: mod_base = OTHER; note = 2'-fluoro modified nucleotide
  modified_base 74: mod_base = OTHER; note = 2'-fluoro modified nucleotide
  modified_base 75: mod_base = OTHER; note = 2'-fluoro modified nucleotide
  modified_base 76: mod_base = OTHER; note = 2'-fluoro modified nucleotide
  modified_base 88: mod_base = OTHER; note = 2'-fluoro modified nucleotide
  modified_base 89: mod_base = OTHER; note = 2'-fluoro modified nucleotide
  modified_base 90: mod_base = OTHER; note = 2'-fluoro modified nucleotide
  modified_base 98: mod_base = OTHER; note = Nucleotide with phosphorothioate linkage
  modified_base 99: mod_base = OTHER; note = 2'-O-methyl modified nucleotide with phosphorothioate linkage
  modified_base 100: mod_base = OTHER; note = 2'-O-methyl modified nucleotide with phosphorothioate linkage
  modified_base 101: mod_base = OTHER; note = 2'-O-methyl modified nucleotide
taaggctgtgctgaccatcgagtctttgtactctggctagaaatagccagaagctacaaagataaggcttcatgccgaaatcatttctcgtcgatggtcag

SEQ ID NO: 29734 - RNA, 100 nt, synthetic construct; identical to SEQ ID NO: 27143
  source 1..100: mol_type = other RNA

SEQ ID NO: 29735 - RNA, 101 nt, synthetic construct; identical to SEQ ID NO: 29730
  source 1..101: mol_type = other RNA

SEQ ID NO: 29736 - RNA, 101 nt, synthetic construct; identical to SEQ ID NO: 29731
  source 1..101: mol_type = other RNA

SEQ ID NO: 29737 - RNA, 101 nt, synthetic construct; identical to SEQ ID NO: 29733
  source 1..101: mol_type = other RNA

SEQ ID NO: 29738 - RNA, 101 nt, synthetic construct
  source 1..101: mol_type = other RNA
taaggctgtgctgaccatcgagtctttgtactctgcgcggtaacgcgcagaagctacaaagataaggcttcatgccgaaatcatttctcgtcgatggtcag

SEQ ID NO: 29739 - RNA, 101 nt, synthetic construct; identical to SEQ ID NO: 29730
  source 1..101: mol_type = other RNA
  modified_base 1: mod_base = OTHER; note = 2'-O-methyl modified nucleotide with phosphorothioate linkage
  modified_base 2: mod_base = OTHER; note = 2'-O-methyl modified nucleotide with phosphorothioate linkage
  modified_base 3: mod_base = OTHER; note = 2'-O-methyl modified nucleotide with phosphorothioate linkage
  modified_base 33: mod_base = OTHER; note = 2'-O-methyl modified nucleotide
  modified_base 34: mod_base = OTHER; note = 2'-O-methyl modified nucleotide
  modified_base 35: mod_base = OTHER; note = 2'-O-methyl modified nucleotide
  modified_base 36: mod_base = OTHER; note = 2'-O-methyl modified nucleotide
  modified_base 37: mod_base = OTHER; note = 2'-O-methyl modified nucleotide
  modified_base 38: mod_base = OTHER; note = 2'-O-methyl modified nucleotide
  modified_base 39: mod_base = OTHER; note = 2'-O-methyl modified nucleotide
  modified_base 40: mod_base = OTHER; note = 2'-O-methyl modified nucleotide
  modified_base 41: mod_base = OTHER; note = 2'-O-methyl modified nucleotide
  modified_base 42: mod_base = OTHER; note = 2'-O-methyl modified nucleotide
  modified_base 43: mod_base = OTHER; note = 2'-O-methyl modified nucleotide
  modified_base 44: mod_base = OTHER; note = 2'-O-methyl modified nucleotide
  modified_base 45: mod_base = OTHER; note = 2'-O-methyl modified nucleotide
  modified_base 46: mod_base = OTHER; note = 2'-O-methyl modified nucleotide
  modified_base 47: mod_base = OTHER; note = 2'-O-methyl modified nucleotide
  modified_base 48: mod_base = OTHER; note = 2'-O-methyl modified nucleotide
  modified_base 49: mod_base = OTHER; note = 2'-O-methyl modified nucleotide
  modified_base 50: mod_base = OTHER; note = 2'-O-methyl modified nucleotide
  modified_base 63: mod_base = OTHER; note = 2'-O-methyl modified nucleotide
  modified_base 64: mod_base = OTHER; note = 2'-O-methyl modified nucleotide
  modified_base 65: mod_base = OTHER; note = 2'-O-methyl modified nucleotide
  modified_base 98: mod_base = OTHER; note = Nucleotide with phosphorothioate linkage
  modified_base 99: mod_base = OTHER; note = 2'-O-methyl modified nucleotide with phosphorothioate linkage
  modified_base 100: mod_base = OTHER; note = 2'-O-methyl modified nucleotide with phosphorothioate linkage
  modified_base 101: mod_base = OTHER; note = 2'-O-methyl modified nucleotide

SEQ ID NO: 29740 - RNA, 101 nt, synthetic construct; identical to SEQ ID NO: 29731
  source 1..101: mol_type = other RNA
  modified_base 1: mod_base = OTHER; note = 2'-O-methyl modified nucleotide with phosphorothioate linkage
  modified_base 2: mod_base = OTHER; note = 2'-O-methyl modified nucleotide with phosphorothioate linkage
  modified_base 3: mod_base = OTHER; note = 2'-O-methyl modified nucleotide with phosphorothioate linkage
  modified_base 33: mod_base = OTHER; note = 2'-O-methyl modified nucleotide
  modified_base 34: mod_base = OTHER; note = 2'-O-methyl modified nucleotide
  modified_base 35: mod_base = OTHER; note = 2'-O-methyl modified nucleotide
  modified_base 36: mod_base = OTHER; note = 2'-O-methyl modified nucleotide
  modified_base 37: mod_base = OTHER; note = 2'-O-methyl modified nucleotide
  modified_base 38: mod_base = OTHER; note = 2'-O-methyl modified nucleotide
  modified_base 39: mod_base = OTHER; note = 2'-O-methyl modified nucleotide
  modified_base 40: mod_base = OTHER; note = 2'-O-methyl modified nucleotide
  modified_base 41: mod_base = OTHER; note = 2'-O-methyl modified nucleotide
  modified_base 42: mod_base = OTHER; note = 2'-O-methyl modified nucleotide
  modified_base 43: mod_base = OTHER; note = 2'-O-methyl modified nucleotide
  modified_base 44: mod_base = OTHER; note = 2'-O-methyl modified nucleotide
  modified_base 45: mod_base = OTHER; note = 2'-O-methyl modified nucleotide
  modified_base 46: mod_base = OTHER; note = 2'-O-methyl modified nucleotide
  modified_base 47: mod_base = OTHER; note = 2'-O-methyl modified nucleotide
  modified_base 48: mod_base = OTHER; note = 2'-O-methyl modified nucleotide
  modified_base 49: mod_base = OTHER; note = 2'-O-methyl modified nucleotide
  modified_base 50: mod_base = OTHER; note = 2'-O-methyl modified nucleotide
  modified_base 63: mod_base = OTHER; note = 2'-O-methyl modified nucleotide
  modified_base 64: mod_base = OTHER; note = 2'-O-methyl modified nucleotide
  modified_base 65: mod_base = OTHER; note = 2'-O-methyl modified nucleotide
  modified_base 98: mod_base = OTHER; note = Nucleotide with phosphorothioate linkage
  modified_base 99: mod_base = OTHER; note = 2'-O-methyl modified nucleotide with phosphorothioate linkage
  modified_base 100: mod_base = OTHER; note = 2'-O-methyl modified nucleotide with phosphorothioate linkage
  modified_base 101: mod_base = OTHER; note = 2'-O-methyl modified nucleotide

SEQ ID NO: 29741 - RNA, 101 nt, synthetic construct
  source 1..101: mol_type = other RNA
  modified_base 1: mod_base = OTHER; note = 2'-O-methyl modified nucleotide with phosphorothioate linkage
  modified_base 2: mod_base = OTHER; note = 2'-O-methyl modified nucleotide with phosphorothioate linkage
  modified_base 3: mod_base = OTHER; note = 2'-O-methyl modified nucleotide with phosphorothioate linkage
  modified_base 33: mod_base = OTHER; note = 2'-O-methyl modified nucleotide
  modified_base 34: mod_base = OTHER; note = 2'-O-methyl modified nucleotide
  modified_base 35: mod_base = OTHER; note = 2'-O-methyl modified nucleotide
  modified_base 36: mod_base = OTHER; note = 2'-O-methyl modified nucleotide
  modified_base 37: mod_base = OTHER; note = 2'-O-methyl modified nucleotide
  modified_base 38: mod_base = OTHER; note = 2'-O-methyl modified nucleotide
  modified_base 39: mod_base = OTHER; note = 2'-O-methyl modified nucleotide
  modified_base 40: mod_base = OTHER; note = 2'-O-methyl modified nucleotide
  modified_base 41: mod_base = OTHER; note = 2'-O-methyl modified nucleotide
  modified_base 42: mod_base = OTHER; note = 2'-O-methyl modified nucleotide
  modified_base 43: mod_base = OTHER; note = 2'-O-methyl modified nucleotide
  modified_base 44: mod_base = OTHER; note = 2'-O-methyl modified nucleotide
  modified_base 45: mod_base = OTHER; note = 2'-O-methyl modified nucleotide
  modified_base 46: mod_base = OTHER; note = 2'-O-methyl modified nucleotide
  modified_base 47: mod_base = OTHER; note = 2'-O-methyl modified nucleotide
  modified_base 48: mod_base = OTHER; note = 2'-O-methyl modified nucleotide
  modified_base 49: mod_base = OTHER; note = 2'-O-methyl modified nucleotide
  modified_base 50: mod_base = OTHER; note = 2'-O-methyl modified nucleotide
  modified_base 63: mod_base = OTHER; note = 2'-O-methyl modified nucleotide
  modified_base 64: mod_base = OTHER; note = 2'-O-methyl modified nucleotide
  modified_base 65: mod_base = OTHER; note = 2'-O-methyl modified nucleotide
  modified_base 98: mod_base = OTHER; note = Nucleotide with phosphorothioate linkage
  modified_base 99: mod_base = OTHER; note = 2'-O-methyl modified nucleotide with phosphorothioate linkage
  modified_base 100: mod_base = OTHER; note = 2'-O-methyl modified nucleotide with phosphorothioate linkage
  modified_base 101: mod_base = OTHER; note = 2'-O-methyl modified nucleotide
taaggctgtgctgaccatcgagtctttgtactctgggacttcggtcccagaagctacaaagataaggcttcatgccgaattcatttctcgtcgatggtcag

SEQ ID NO: 29742 - RNA, 101 nt, synthetic construct
  source 1..101: mol_type = other RNA
  modified_base 1: mod_base = OTHER; note = 2'-O-methyl modified nucleotide with phosphorothioate linkage
  modified_base 2: mod_base = OTHER; note = 2'-O-methyl modified nucleotide with phosphorothioate linkage
  modified_base 3: mod_base = OTHER; note = 2'-O-methyl modified nucleotide with phosphorothioate linkage
  modified_base 33: mod_base = OTHER; note = 2'-O-methyl modified nucleotide
  modified_base 34: mod_base = OTHER; note = 2'-O-methyl modified nucleotide
  modified_base 35: mod_base = OTHER; note = 2'-O-methyl modified nucleotide
  modified_base 36: mod_base = OTHER; note = 2'-O-methyl modified nucleotide
  modified_base 37: mod_base = OTHER; note = 2'-O-methyl modified nucleotide
  modified_base 38: mod_base = OTHER; note = 2'-O-methyl modified nucleotide
  modified_base 39: mod_base = OTHER; note = 2'-O-methyl modified nucleotide
  modified_base 40: mod_base = OTHER; note = 2'-O-methyl modified nucleotide
  modified_base 41: mod_base = OTHER; note = 2'-O-methyl modified nucleotide
  modified_base 42: mod_base = OTHER; note = 2'-O-methyl modified nucleotide
  modified_base 43: mod_base = OTHER; note = 2'-O-methyl modified nucleotide
  modified_base 44: mod_base = OTHER; note = 2'-O-methyl modified nucleotide
  modified_base 45: mod_base = OTHER; note = 2'-O-methyl modified nucleotide
  modified_base 46: mod_base = OTHER; note = 2'-O-methyl modified nucleotide
  modified_base 47: mod_base = OTHER; note = 2'-O-methyl modified nucleotide
  modified_base 48: mod_base = OTHER; note = 2'-O-methyl modified nucleotide
  modified_base 49: mod_base = OTHER; note = 2'-O-methyl modified nucleotide
  modified_base 50: mod_base = OTHER; note = 2'-O-methyl modified nucleotide
  modified_base 63: mod_base = OTHER; note = 2'-O-methyl modified nucleotide
  modified_base 64: mod_base = OTHER; note = 2'-O-methyl modified nucleotide
  modified_base 65: mod_base = OTHER; note = 2'-O-methyl modified nucleotide
  modified_base 98: mod_base = OTHER; note = Nucleotide with phosphorothioate linkage
  modified_base 99: mod_base = OTHER; note = 2'-O-methyl modified nucleotide with phosphorothioate linkage
  modified_base 100: mod_base = OTHER; note = 2'-O-methyl modified nucleotide with phosphorothioate linkage
  modified_base 101: mod_base = OTHER; note = 2'-O-methyl modified nucleotide
taaggctgtgctgaccatcgagtctttgtactctgggacttcggtcccagaagctacaaagataaggcttcatgccgaaatcctttctcgtcgatggtcag

SEQ ID NO: 29743 - RNA, 101 nt, synthetic construct
  source 1..101: mol_type = other RNA
  modified_base 1: mod_base = OTHER; note = 2'-O-methyl modified nucleotide with phosphorothioate linkage
  modified_base 2: mod_base = OTHER; note = 2'-O-methyl modified nucleotide with phosphorothioate linkage
  modified_base 3: mod_base = OTHER; note = 2'-O-methyl modified nucleotide with phosphorothioate linkage
  modified_base 33: mod_base = OTHER; note = 2'-O-methyl modified nucleotide
  modified_base 34: mod_base = OTHER; note = 2'-O-methyl modified nucleotide
  modified_base 35: mod_base = OTHER; note = 2'-O-methyl modified nucleotide
  modified_base 36: mod_base = OTHER; note = 2'-O-methyl modified nucleotide
  modified_base 37: mod_base = OTHER; note = 2'-O-methyl modified nucleotide
  modified_base 38: mod_base = OTHER; note = 2'-O-methyl modified nucleotide
  modified_base 39: mod_base = OTHER; note = 2'-O-methyl modified nucleotide
  modified_base 40: mod_base = OTHER; note = 2'-O-methyl modified nucleotide
  modified_base 41: mod_base = OTHER; note = 2'-O-methyl modified nucleotide
  modified_base 42: mod_base = OTHER; note = 2'-O-methyl modified nucleotide
  modified_base 43: mod_base = OTHER; note = 2'-O-methyl modified nucleotide
  modified_base 44: mod_base = OTHER; note = 2'-O-methyl modified nucleotide
  modified_base 45: mod_base = OTHER; note = 2'-O-methyl modified nucleotide
  modified_base 46: mod_base = OTHER; note = 2'-O-methyl modified nucleotide
  modified_base 47: mod_base = OTHER; note = 2'-O-methyl modified nucleotide
  modified_base 48: mod_base = OTHER; note = 2'-O-methyl modified nucleotide
  modified_base 49: mod_base = OTHER; note = 2'-O-methyl modified nucleotide
  modified_base 50: mod_base = OTHER; note = 2'-O-methyl modified nucleotide
  modified_base 63: mod_base = OTHER; note = 2'-O-methyl modified nucleotide
  modified_base 64: mod_base = OTHER; note = 2'-O-methyl modified nucleotide
  modified_base 65: mod_base = OTHER; note = 2'-O-methyl modified nucleotide
  modified_base 98: mod_base = OTHER; note = Nucleotide with phosphorothioate linkage
  modified_base 99: mod_base = OTHER; note = 2'-O-methyl modified nucleotide with phosphorothioate linkage
  modified_base 100: mod_base = OTHER; note = 2'-O-methyl modified nucleotide with phosphorothioate linkage
  modified_base 101: mod_base = OTHER; note = 2'-O-methyl modified nucleotide
taaggctgtgctgaccatcgagtctttgtactctgggacttcggtcccagaagctacaaagataaggcttcatgccgaattcctttctcgtcgatggtcag

SEQ ID NO: 29744 - RNA, 101 nt, synthetic construct
  source 1..101: mol_type = other RNA
  modified_base 1: mod_base = OTHER; note = 2'-O-methyl modified nucleotide with phosphorothioate linkage
  modified_base 2: mod_base = OTHER; note = 2'-O-methyl modified nucleotide with phosphorothioate linkage
  modified_base 3: mod_base = OTHER; note = 2'-O-methyl modified nucleotide with phosphorothioate linkage
  modified_base 33: mod_base = OTHER; note = 2'-O-methyl modified nucleotide
  modified_base 34: mod_base = OTHER; note = 2'-O-methyl modified nucleotide
  modified_base 35: mod_base = OTHER; note = 2'-O-methyl modified nucleotide
  modified_base 36: mod_base = OTHER; note = 2'-O-methyl modified nucleotide
  modified_base 37: mod_base = OTHER; note = 2'-O-methyl modified nucleotide
  modified_base 38: mod_base = OTHER; note = 2'-O-methyl modified nucleotide
  modified_base 39: mod_base = OTHER; note = 2'-O-methyl modified nucleotide
  modified_base 40: mod_base = OTHER; note = 2'-O-methyl modified nucleotide
  modified_base 41: mod_base = OTHER; note = 2'-O-methyl modified nucleotide
  modified_base 42: mod_base = OTHER; note = 2'-O-methyl modified nucleotide
  modified_base 43: mod_base = OTHER; note = 2'-O-methyl modified nucleotide
  modified_base 44: mod_base = OTHER; note = 2'-O-methyl modified nucleotide
  modified_base 45: mod_base = OTHER; note = 2'-O-methyl modified nucleotide
  modified_base 46: mod_base = OTHER; note = 2'-O-methyl modified nucleotide
  modified_base 47: mod_base = OTHER; note = 2'-O-methyl modified nucleotide
  modified_base 48: mod_base = OTHER; note = 2'-O-methyl modified nucleotide
  modified_base 49: mod_base = OTHER; note = 2'-O-methyl modified nucleotide
  modified_base 50: mod_base = OTHER; note = 2'-O-methyl modified nucleotide
  modified_base 63: mod_base = OTHER; note = 2'-O-methyl modified nucleotide
  modified_base 64: mod_base = OTHER; note = 2'-O-methyl modified nucleotide
  modified_base 65: mod_base = OTHER; note = 2'-O-methyl modified nucleotide
  modified_base 98: mod_base = OTHER; note = Nucleotide with phosphorothioate linkage
  modified_base 99: mod_base = OTHER; note = 2'-O-methyl modified nucleotide with phosphorothioate linkage
  modified_base 100: mod_base = OTHER; note = 2'-O-methyl modified nucleotide with phosphorothioate linkage
  modified_base 101: mod_base = OTHER; note = 2'-O-methyl modified nucleotide
taaggctgtgctgaccatcgagtcgttgtactctgggacttcggtcccagaagctacaacgataaggcttcatgccgaaatcctttctcgtcgatggtcag

SEQ ID NO: 29745 - RNA, 101 nt, synthetic construct
  source 1..101: mol_type = other RNA
  modified_base 1: mod_base = OTHER; note = 2'-O-methyl modified nucleotide with phosphorothioate linkage
  modified_base 2: mod_base = OTHER; note = 2'-O-methyl modified nucleotide with phosphorothioate linkage
  modified_base 3: mod_base = OTHER; note = 2'-O-methyl modified nucleotide with phosphorothioate linkage
  modified_base 33: mod_base = OTHER; note = 2'-O-methyl modified nucleotide
  modified_base 34: mod_base = OTHER; note = 2'-O-methyl modified nucleotide
  modified_base 35: mod_base = OTHER; note = 2'-O-methyl modified nucleotide
  modified_base 36: mod_base = OTHER; note = 2'-O-methyl modified nucleotide
  modified_base 37: mod_base = OTHER; note = 2'-O-methyl modified nucleotide
  modified_base 38: mod_base = OTHER; note = 2'-O-methyl modified nucleotide
  modified_base 39: mod_base = OTHER; note = 2'-O-methyl modified nucleotide
  modified_base 40: mod_base = OTHER; note = 2'-O-methyl modified nucleotide
  modified_base 41: mod_base = OTHER; note = 2'-O-methyl modified nucleotide
  modified_base 42: mod_base = OTHER; note = 2'-O-methyl modified nucleotide
  modified_base 43: mod_base = OTHER; note = 2'-O-methyl modified nucleotide
  modified_base 44: mod_base = OTHER; note = 2'-O-methyl modified nucleotide
  modified_base 45: mod_base = OTHER; note = 2'-O-methyl modified nucleotide
  modified_base 46: mod_base = OTHER; note = 2'-O-methyl modified nucleotide
  modified_base 47: mod_base = OTHER; note = 2'-O-methyl modified nucleotide
  modified_base 48: mod_base = OTHER; note = 2'-O-methyl modified nucleotide
  modified_base 49: mod_base = OTHER; note = 2'-O-methyl modified nucleotide
  modified_base 50: mod_base = OTHER; note = 2'-O-methyl modified nucleotide
  modified_base 63: mod_base = OTHER; note = 2'-O-methyl modified nucleotide
  modified_base 64: mod_base = OTHER; note = 2'-O-methyl modified nucleotide
  modified_base 65: mod_base = OTHER; note = 2'-O-methyl modified nucleotide
  modified_base 98: mod_base = OTHER; note = Nucleotide with phosphorothioate linkage
  modified_base 99: mod_base = OTHER; note = 2'-O-methyl modified nucleotide with phosphorothioate linkage
  modified_base 100: mod_base = OTHER; note = 2'-O-methyl modified nucleotide with phosphorothioate linkage
  modified_base 101: mod_base = OTHER; note = 2'-O-methyl modified nucleotide
taaggctgtgctgaccatcgagtcgttgtactctgggacttcggtcccagaagctacaacgataaggcttcatgccgaattcatttctcgtcgatggtcag

SEQ ID NO: 29746 - RNA, 101 nt, synthetic construct
  source 1..101: mol_type = other RNA
  modified_base 1: mod_base = OTHER; note = 2'-O-methyl modified nucleotide with phosphorothioate linkage
  modified_base 2: mod_base = OTHER; note = 2'-O-methyl modified nucleotide with phosphorothioate linkage
  modified_base 3: mod_base = OTHER; note = 2'-O-methyl modified nucleotide with phosphorothioate linkage
  modified_base 33: mod_base = OTHER; note = 2'-O-methyl modified nucleotide
  modified_base 34: mod_base = OTHER; note = 2'-O-methyl modified nucleotide
  modified_base 35: mod_base = OTHER; note = 2'-O-methyl modified nucleotide
  modified_base 36: mod_base = OTHER; note = 2'-O-methyl modified nucleotide
  modified_base 37: mod_base = OTHER; note = 2'-O-methyl modified nucleotide
  modified_base 38: mod_base = OTHER; note = 2'-O-methyl modified nucleotide
  modified_base 39: mod_base = OTHER; note = 2'-O-methyl modified nucleotide
  modified_base 40: mod_base = OTHER; note = 2'-O-methyl modified nucleotide
  modified_base 41: mod_base = OTHER; note = 2'-O-methyl modified nucleotide
  modified_base 42: mod_base = OTHER; note = 2'-O-methyl modified nucleotide
  modified_base 43: mod_base = OTHER; note = 2'-O-methyl modified nucleotide
  modified_base 44: mod_base = OTHER; note = 2'-O-methyl modified nucleotide
  modified_base 45: mod_base = OTHER; note = 2'-O-methyl modified nucleotide
  modified_base 46: mod_base = OTHER; note = 2'-O-methyl modified nucleotide
  modified_base 47: mod_base = OTHER; note = 2'-O-methyl modified nucleotide
  modified_base 48: mod_base = OTHER; note = 2'-O-methyl modified nucleotide
  modified_base 49: mod_base = OTHER; note = 2'-O-methyl modified nucleotide
  modified_base 50: mod_base = OTHER; note = 2'-O-methyl modified nucleotide
  modified_base 63: mod_base = OTHER; note = 2'-O-methyl modified nucleotide
  modified_base 64: mod_base = OTHER; note = 2'-O-methyl modified nucleotide
  modified_base 65: mod_base = OTHER; note = 2'-O-methyl modified nucleotide
  modified_base 98: mod_base = OTHER; note = Nucleotide with phosphorothioate linkage
  modified_base 99: mod_base = OTHER; note = 2'-O-methyl modified nucleotide with phosphorothioate linkage
  modified_base 100: mod_base = OTHER; note = 2'-O-methyl modified nucleotide with phosphorothioate linkage
  modified_base 101: mod_base = OTHER; note = 2'-O-methyl modified nucleotide
taaggctgtgctgaccatcgagtcgttgtactctgggacttcggtcccagaagctacaacgataaggcttcatgccgaattcctttctcgtcgatggtcag

SEQ ID NO: 29747 - RNA, 101 nt, synthetic construct; identical to SEQ ID NO: 29733
  source 1..101: mol_type = other RNA
  modified_base 1: mod_base = OTHER; note = 2'-O-methyl modified nucleotide with phosphorothioate linkage
  modified_base 2: mod_base = OTHER; note = 2'-O-methyl modified nucleotide with phosphorothioate linkage
  modified_base 3: mod_base = OTHER; note = 2'-O-methyl modified nucleotide with phosphorothioate linkage
  modified_base 33: mod_base = OTHER; note = 2'-O-methyl modified nucleotide
  modified_base 34: mod_base = OTHER; note = 2'-O-methyl modified nucleotide
  modified_base 35: mod_base = OTHER; note = 2'-O-methyl modified nucleotide
  modified_base 36: mod_base = OTHER; note = 2'-O-methyl modified nucleotide
  modified_base 37: mod_base = OTHER; note = 2'-O-methyl modified nucleotide
  modified_base 38: mod_base = OTHER; note = 2'-O-methyl modified nucleotide
  modified_base 39: mod_base = OTHER; note = 2'-O-methyl modified nucleotide
  modified_base 40: mod_base = OTHER; note = 2'-O-methyl modified nucleotide
  modified_base 41: mod_base = OTHER; note = 2'-O-methyl modified nucleotide
  modified_base 42: mod_base = OTHER; note = 2'-O-methyl modified nucleotide
  modified_base 43: mod_base = OTHER; note = 2'-O-methyl modified nucleotide
  modified_base 44: mod_base = OTHER; note = 2'-O-methyl modified nucleotide
  modified_base 45: mod_base = OTHER; note = 2'-O-methyl modified nucleotide
  modified_base 46: mod_base = OTHER; note = 2'-O-methyl modified nucleotide
  modified_base 47: mod_base = OTHER; note = 2'-O-methyl modified nucleotide
  modified_base 48: mod_base = OTHER; note = 2'-O-methyl modified nucleotide
  modified_base 49: mod_base = OTHER; note = 2'-O-methyl modified nucleotide
  modified_base 50: mod_base = OTHER; note = 2'-O-methyl modified nucleotide
  modified_base 63: mod_base = OTHER; note = 2'-O-methyl modified nucleotide
  modified_base 64: mod_base = OTHER; note = 2'-O-methyl modified nucleotide
  modified_base 65: mod_base = OTHER; note = 2'-O-methyl modified nucleotide
  modified_base 98: mod_base = OTHER; note = Nucleotide with phosphorothioate linkage
  modified_base 99: mod_base = OTHER; note = 2'-O-methyl modified nucleotide with phosphorothioate linkage
  modified_base 100: mod_base = OTHER; note = 2'-O-methyl modified nucleotide with phosphorothioate linkage
  modified_base 101: mod_base = OTHER; note = 2'-O-methyl modified nucleotide

SEQ ID NO: 29748 - RNA, 101 nt, synthetic construct
  source 1..101: mol_type = other RNA
  modified_base 1: mod_base = OTHER; note = 2'-O-methyl modified nucleotide with phosphorothioate linkage
  modified_base 2: mod_base = OTHER; note = 2'-O-methyl modified nucleotide with phosphorothioate linkage
  modified_base 3: mod_base = OTHER; note = 2'-O-methyl modified nucleotide with phosphorothioate linkage
  modified_base 33: mod_base = OTHER; note = 2'-O-methyl modified nucleotide
  modified_base 34: mod_base = OTHER; note = 2'-O-methyl modified nucleotide
  modified_base 35: mod_base = OTHER; note = 2'-O-methyl modified nucleotide
  modified_base 36: mod_base = OTHER; note = 2'-O-methyl modified nucleotide
  modified_base 37: mod_base = OTHER; note = 2'-O-methyl modified nucleotide
  modified_base 38: mod_base = OTHER; note = 2'-O-methyl modified nucleotide
  modified_base 39: mod_base = OTHER; note = 2'-O-methyl modified nucleotide
  modified_base 40: mod_base = OTHER; note = 2'-O-methyl modified nucleotide
  modified_base 41: mod_base = OTHER; note = 2'-O-methyl modified nucleotide
  modified_base 42: mod_base = OTHER; note = 2'-O-methyl modified nucleotide
  modified_base 43: mod_base = OTHER; note = 2'-O-methyl modified nucleotide
  modified_base 44: mod_base = OTHER; note = 2'-O-methyl modified nucleotide
  modified_base 45: mod_base = OTHER; note = 2'-O-methyl modified nucleotide
  modified_base 46: mod_base = OTHER; note = 2'-O-methyl modified nucleotide
  modified_base 47: mod_base = OTHER; note = 2'-O-methyl modified nucleotide
  modified_base 48: mod_base = OTHER; note = 2'-O-methyl modified nucleotide
  modified_base 49: mod_base = OTHER; note = 2'-O-methyl modified nucleotide
  modified_base 50: mod_base = OTHER; note = 2'-O-methyl modified nucleotide
  modified_base 63: mod_base = OTHER; note = 2'-O-methyl modified nucleotide
  modified_base 64: mod_base = OTHER; note = 2'-O-methyl modified nucleotide
  modified_base 65: mod_base = OTHER; note = 2'-O-methyl modified nucleotide
  modified_base 98: mod_base = OTHER; note = Nucleotide with phosphorothioate linkage
  modified_base 99: mod_base = OTHER; note = 2'-O-methyl modified nucleotide with phosphorothioate linkage
  modified_base 100: mod_base = OTHER; note = 2'-O-methyl modified nucleotide with phosphorothioate linkage
  modified_base 101: mod_base = OTHER; note = 2'-O-methyl modified nucleotide
taaggctgtgctgaccatcgagtcgttgtactctggctagaaatagccagaagctacaacgataaggcttcatgccgaaatcatttctcgtcgatggtcag

SEQ ID NO: 29749 - RNA, 101 nt, synthetic construct
  source 1..101: mol_type = other RNA
  modified_base 1: mod_base = OTHER; note = 2'-O-methyl modified nucleotide with phosphorothioate linkage
  modified_base 2: mod_base = OTHER; note = 2'-O-methyl modified nucleotide with phosphorothioate linkage
  modified_base 3: mod_base = OTHER; note = 2'-O-methyl modified nucleotide with phosphorothioate linkage
  modified_base 33: mod_base = OTHER; note = 2'-O-methyl modified nucleotide
  modified_base 34: mod_base = OTHER; note = 2'-O-methyl modified nucleotide
  modified_base 35: mod_base = OTHER; note = 2'-O-methyl modified nucleotide
  modified_base 36: mod_base = OTHER; note = 2'-O-methyl modified nucleotide
  modified_base 37: mod_base = OTHER; note = 2'-O-methyl modified nucleotide
  modified_base 38: mod_base = OTHER; note = 2'-O-methyl modified nucleotide
  modified_base 39: mod_base = OTHER; note = 2'-O-methyl modified nucleotide
  modified_base 40: mod_base = OTHER; note = 2'-O-methyl modified nucleotide
  modified_base 41: mod_base = OTHER; note = 2'-O-methyl modified nucleotide
  modified_base 42: mod_base = OTHER; note = 2'-O-methyl modified nucleotide
  modified_base 43: mod_base = OTHER; note = 2'-O-methyl modified nucleotide
  modified_base 44: mod_base = OTHER; note = 2'-O-methyl modified nucleotide
  modified_base 45: mod_base = OTHER; note = 2'-O-methyl modified nucleotide
  modified_base 46: mod_base = OTHER; note = 2'-O-methyl modified nucleotide
  modified_base 47: mod_base = OTHER; note = 2'-O-methyl modified nucleotide
  modified_base 48: mod_base = OTHER; note = 2'-O-methyl modified nucleotide
  modified_base 49: mod_base = OTHER; note = 2'-O-methyl modified nucleotide
  modified_base 50: mod_base = OTHER; note = 2'-O-methyl modified nucleotide
  modified_base 63: mod_base = OTHER; note = 2'-O-methyl modified nucleotide
  modified_base 64: mod_base = OTHER; note = 2'-O-methyl modified nucleotide
  modified_base 65: mod_base = OTHER; note = 2'-O-methyl modified nucleotide
  modified_base 98: mod_base = OTHER; note = Nucleotide with phosphorothioate linkage
  modified_base 99: mod_base = OTHER; note = 2'-O-methyl modified nucleotide with phosphorothioate linkage
  modified_base 100: mod_base = OTHER; note = 2'-O-methyl modified nucleotide with phosphorothioate linkage
  modified_base 101: mod_base = OTHER; note = 2'-O-methyl modified nucleotide
taaggctgtgctgaccatcgagtctttgtactctggctagaaatagccagaagctacaaagataaggcttcatgccgaattcatttctcgtcgatggtcag

SEQ ID NO: 29750 - RNA, 101 nt, synthetic construct
  source 1..101: mol_type = other RNA
  modified_base 1: mod_base = OTHER; note = 2'-O-methyl modified nucleotide with phosphorothioate linkage
  modified_base 2: mod_base = OTHER; note = 2'-O-methyl modified nucleotide with phosphorothioate linkage
  modified_base 3: mod_base = OTHER; note = 2'-O-methyl modified nucleotide with phosphorothioate linkage
  modified_base 33: mod_base = OTHER; note = 2'-O-methyl modified nucleotide
  modified_base 34: mod_base = OTHER; note = 2'-O-methyl modified nucleotide
  modified_base 35: mod_base = OTHER; note = 2'-O-methyl modified nucleotide
  modified_base 36: mod_base = OTHER; note = 2'-O-methyl modified nucleotide
  modified_base 37: mod_base = OTHER; note = 2'-O-methyl modified nucleotide
  modified_base 38: mod_base = OTHER; note = 2'-O-methyl modified nucleotide
  modified_base 39: mod_base = OTHER; note = 2'-O-methyl modified nucleotide
  modified_base 40: mod_base = OTHER; note = 2'-O-methyl modified nucleotide
  modified_base 41: mod_base = OTHER; note = 2'-O-methyl modified nucleotide
  modified_base 42: mod_base = OTHER; note = 2'-O-methyl modified nucleotide
  modified_base 43: mod_base = OTHER; note = 2'-O-methyl modified nucleotide
  modified_base 44: mod_base = OTHER; note = 2'-O-methyl modified nucleotide
  modified_base 45: mod_base = OTHER; note = 2'-O-methyl modified nucleotide
  modified_base 46: mod_base = OTHER; note = 2'-O-methyl modified nucleotide
  modified_base 47: mod_base = OTHER; note = 2'-O-methyl modified nucleotide
  modified_base 48: mod_base = OTHER; note = 2'-O-methyl modified nucleotide
  modified_base 49: mod_base = OTHER; note = 2'-O-methyl modified nucleotide
  modified_base 50: mod_base = OTHER; note = 2'-O-methyl modified nucleotide
  modified_base 63: mod_base = OTHER; note = 2'-O-methyl modified nucleotide
  modified_base 64: mod_base = OTHER; note = 2'-O-methyl modified nucleotide
  modified_base 65: mod_base = OTHER; note = 2'-O-methyl modified nucleotide
  modified_base 98: mod_base = OTHER; note = Nucleotide with phosphorothioate linkage
  modified_base 99: mod_base = OTHER; note = 2'-O-methyl modified nucleotide with phosphorothioate linkage
  modified_base 100: mod_base = OTHER; note = 2'-O-methyl modified nucleotide with phosphorothioate linkage
  modified_base 101: mod_base = OTHER; note = 2'-O-methyl modified nucleotide
taaggctgtgctgaccatcgagtctttgtactctggctagaaatagccagaagctacaaagataaggcttcatgccgaaatcctttctcgtcgatggtcag

SEQ ID NO: 29751 - RNA, 101 nt, synthetic construct
  source 1..101: mol_type = other RNA
  modified_base 1: mod_base = OTHER; note = 2'-O-methyl modified nucleotide with phosphorothioate linkage
  modified_base 2: mod_base = OTHER; note = 2'-O-methyl modified nucleotide with phosphorothioate linkage
  modified_base 3: mod_base = OTHER; note = 2'-O-methyl modified nucleotide with phosphorothioate linkage
  modified_base 33: mod_base = OTHER; note = 2'-O-methyl modified nucleotide
  modified_base 34: mod_base = OTHER; note = 2'-O-methyl modified nucleotide
  modified_base 35: mod_base = OTHER; note = 2'-O-methyl modified nucleotide
  modified_base 36: mod_base = OTHER; note = 2'-O-methyl modified nucleotide
  modified_base 37: mod_base = OTHER; note = 2'-O-methyl modified nucleotide
  modified_base 38: mod_base = OTHER; note = 2'-O-methyl modified nucleotide
  modified_base 39: mod_base = OTHER; note = 2'-O-methyl modified nucleotide
  modified_base 40: mod_base = OTHER; note = 2'-O-methyl modified nucleotide
  modified_base 41: mod_base = OTHER; note = 2'-O-methyl modified nucleotide
  modified_base 42: mod_base = OTHER; note = 2'-O-methyl modified nucleotide
  modified_base 43: mod_base = OTHER; note = 2'-O-methyl modified nucleotide
  modified_base 44: mod_base = OTHER; note = 2'-O-methyl modified nucleotide
  modified_base 45: mod_base = OTHER; note = 2'-O-methyl modified nucleotide
  modified_base 46: mod_base = OTHER; note = 2'-O-methyl modified nucleotide
  modified_base 47: mod_base = OTHER; note = 2'-O-methyl modified nucleotide
  modified_base 48: mod_base = OTHER; note = 2'-O-methyl modified nucleotide
  modified_base 49: mod_base = OTHER; note = 2'-O-methyl modified nucleotide
  modified_base 50: mod_base = OTHER; note = 2'-O-methyl modified nucleotide
  modified_base 63: mod_base = OTHER; note = 2'-O-methyl modified nucleotide
  modified_base 64: mod_base = OTHER; note = 2'-O-methyl modified nucleotide
  modified_base 65: mod_base = OTHER; note = 2'-O-methyl modified nucleotide
  modified_base 98: mod_base = OTHER; note = Nucleotide with phosphorothioate linkage
  modified_base 99: mod_base = OTHER; note = 2'-O-methyl modified nucleotide with phosphorothioate linkage
  modified_base 100: mod_base = OTHER; note = 2'-O-methyl modified nucleotide with phosphorothioate linkage
  modified_base 101: mod_base = OTHER; note = 2'-O-methyl modified nucleotide
taaggctgtgctgaccatcgagtctttgtactctggctagaaatagccagaagctacaaagataaggcttcatgccgaattcctttctcgtcgatggtcag

SEQ ID NO: 29752 - RNA, 101 nt, synthetic construct
  source 1..101: mol_type = other RNA
  modified_base 1: mod_base = OTHER; note = 2'-O-methyl modified nucleotide with phosphorothioate linkage
  modified_base 2: mod_base = OTHER; note = 2'-O-methyl modified nucleotide with phosphorothioate linkage
  modified_base 3: mod_base = OTHER; note = 2'-O-methyl modified nucleotide with phosphorothioate linkage
  modified_base 33: mod_base = OTHER; note = 2'-O-methyl modified nucleotide
  modified_base 34: mod_base = OTHER; note = 2'-O-methyl modified nucleotide
  modified_base 35: mod_base = OTHER; note = 2'-O-methyl modified nucleotide
  modified_base 36: mod_base = OTHER; note = 2'-O-methyl modified nucleotide
  modified_base 37: mod_base = OTHER; note = 2'-O-methyl modified nucleotide
  modified_base 38: mod_base = OTHER; note = 2'-O-methyl modified nucleotide
  modified_base 39: mod_base = OTHER; note = 2'-O-methyl modified nucleotide
  modified_base 40: mod_base = OTHER; note = 2'-O-methyl modified nucleotide
  modified_base 41: mod_base = OTHER; note = 2'-O-methyl modified nucleotide
  modified_base 42: mod_base = OTHER; note = 2'-O-methyl modified nucleotide
  modified_base 43: mod_base = OTHER; note = 2'-O-methyl modified nucleotide
  modified_base 44: mod_base = OTHER; note = 2'-O-methyl modified nucleotide
  modified_base 45: mod_base = OTHER; note = 2'-O-methyl modified nucleotide
  modified_base 46: mod_base = OTHER; note = 2'-O-methyl modified nucleotide
  modified_base 47: mod_base = OTHER; note = 2'-O-methyl modified nucleotide
  modified_base 48: mod_base = OTHER; note = 2'-O-methyl modified nucleotide
  modified_base 49: mod_base = OTHER; note = 2'-O-methyl modified nucleotide
  modified_base 50: mod_base = OTHER; note = 2'-O-methyl modified nucleotide
  modified_base 63: mod_base = OTHER; note = 2'-O-methyl modified nucleotide
  modified_base 64: mod_base = OTHER; note = 2'-O-methyl modified nucleotide
  modified_base 65: mod_base = OTHER; note = 2'-O-methyl modified nucleotide
  modified_base 98: mod_base = OTHER; note = Nucleotide with phosphorothioate linkage
  modified_base 99: mod_base = OTHER; note = 2'-O-methyl modified nucleotide with phosphorothioate linkage
  modified_base 100: mod_base = OTHER; note = 2'-O-methyl modified nucleotide with phosphorothioate linkage
  modified_base 101: mod_base = OTHER; note = 2'-O-methyl modified nucleotide
taaggctgtgctgaccatcgagtcgttgtactctggctagaaatagccagaagctacaacgataaggcttcatgccgaaatcctttctcgtcgatggtcag

SEQ ID NO: 29753 - RNA, 101 nt, synthetic construct
  source 1..101: mol_type = other RNA
  modified_base 1: mod_base = OTHER; note = 2'-O-methyl modified nucleotide with phosphorothioate linkage
  modified_base 2: mod_base = OTHER; note = 2'-O-methyl modified nucleotide with phosphorothioate linkage
  modified_base 3: mod_base = OTHER; note = 2'-O-methyl modified nucleotide with phosphorothioate linkage
  modified_base 33: mod_base = OTHER; note = 2'-O-methyl modified nucleotide
  modified_base 34: mod_base = OTHER; note = 2'-O-methyl modified nucleotide
  modified_base 35: mod_base = OTHER; note = 2'-O-methyl modified nucleotide
  modified_base 36: mod_base = OTHER; note = 2'-O-methyl modified nucleotide
  modified_base 37: mod_base = OTHER; note = 2'-O-methyl modified nucleotide
  modified_base 38: mod_base = OTHER; note = 2'-O-methyl modified nucleotide
  modified_base 39: mod_base = OTHER; note = 2'-O-methyl modified nucleotide
  modified_base 40: mod_base = OTHER; note = 2'-O-methyl modified nucleotide
  modified_base 41: mod_base = OTHER; note = 2'-O-methyl modified nucleotide
  modified_base 42: mod_base = OTHER; note = 2'-O-methyl modified nucleotide
  modified_base 43: mod_base = OTHER; note = 2'-O-methyl modified nucleotide
  modified_base 44: mod_base = OTHER; note = 2'-O-methyl modified nucleotide
  modified_base 45: mod_base = OTHER; note = 2'-O-methyl modified nucleotide
  modified_base 46: mod_base = OTHER; note = 2'-O-methyl modified nucleotide
  modified_base 47: mod_base = OTHER; note = 2'-O-methyl modified nucleotide
  modified_base 48: mod_base = OTHER; note = 2'-O-methyl modified nucleotide
  modified_base 49: mod_base = OTHER; note = 2'-O-methyl modified nucleotide
  modified_base 50: mod_base = OTHER; note = 2'-O-methyl modified nucleotide
  modified_base 63: mod_base = OTHER; note = 2'-O-methyl modified nucleotide
  modified_base 64: mod_base = OTHER; note = 2'-O-methyl modified nucleotide
  modified_base 65: mod_base = OTHER; note = 2'-O-methyl modified nucleotide
  modified_base 98: mod_base = OTHER; note = Nucleotide with phosphorothioate linkage
  modified_base 99: mod_base = OTHER; note = 2'-O-methyl modified nucleotide with phosphorothioate linkage
  modified_base 100: mod_base = OTHER; note = 2'-O-methyl modified nucleotide with phosphorothioate linkage
  modified_base 101: mod_base = OTHER; note = 2'-O-methyl modified nucleotide
taaggctgtgctgaccatcgagtcgttgtactctggctagaaatagccagaagctacaacgataaggcttcatgccgaattcatttctcgtcgatggtcag

SEQ ID NO: 29754 - RNA, 101 nt, synthetic construct
  source 1..101: mol_type = other RNA
  modified_base 1: mod_base = OTHER; note = 2'-O-methyl modified nucleotide with phosphorothioate linkage
  modified_base 2: mod_base = OTHER; note = 2'-O-methyl modified nucleotide with phosphorothioate linkage
  modified_base 3: mod_base = OTHER; note = 2'-O-methyl modified nucleotide with phosphorothioate linkage
  modified_base 33: mod_base = OTHER; note = 2'-O-methyl modified nucleotide
  modified_base 34: mod_base = OTHER; note = 2'-O-methyl modified nucleotide
  modified_base 35: mod_base = OTHER; note = 2'-O-methyl modified nucleotide
  modified_base 36: mod_base = OTHER; note = 2'-O-methyl modified nucleotide
  modified_base 37: mod_base = OTHER; note = 2'-O-methyl modified nucleotide
  modified_base 38: mod_base = OTHER; note = 2'-O-methyl modified nucleotide
  modified_base 39: mod_base = OTHER; note = 2'-O-methyl modified nucleotide
  modified_base 40: mod_base = OTHER; note = 2'-O-methyl modified nucleotide
  modified_base 41: mod_base = OTHER; note = 2'-O-methyl modified nucleotide
  modified_base 42: mod_base = OTHER; note = 2'-O-methyl modified nucleotide
  modified_base 43: mod_base = OTHER; note = 2'-O-methyl modified nucleotide
  modified_base 44: mod_base = OTHER; note = 2'-O-methyl modified nucleotide
  modified_base 45: mod_base = OTHER; note = 2'-O-methyl modified nucleotide
  modified_base 46: mod_base = OTHER; note = 2'-O-methyl modified nucleotide
  modified_base 47: mod_base = OTHER; note = 2'-O-methyl modified nucleotide
  modified_base 48: mod_base = OTHER; note = 2'-O-methyl modified nucleotide
  modified_base 49: mod_base = OTHER; note = 2'-O-methyl modified nucleotide
  modified_base 50: mod_base = OTHER; note = 2'-O-methyl modified nucleotide
  modified_base 63: mod_base = OTHER; note = 2'-O-methyl modified nucleotide
  modified_base 64: mod_base = OTHER; note = 2'-O-methyl modified nucleotide
  modified_base 65: mod_base = OTHER; note = 2'-O-methyl modified nucleotide
  modified_base 98: mod_base = OTHER; note = Nucleotide with phosphorothioate linkage
  modified_base 99: mod_base = OTHER; note = 2'-O-methyl modified nucleotide with phosphorothioate linkage
  modified_base 100: mod_base = OTHER; note = 2'-O-methyl modified nucleotide with phosphorothioate linkage
  modified_base 101: mod_base = OTHER; note = 2'-O-methyl modified nucleotide
taaggctgtgctgaccatcgagtcgttgtactctggctagaaatagccagaagctacaacgataaggcttcatgccgaattcctttctcgtcgatggtcag

SEQ ID NO: 29755 - RNA, 101 nt, synthetic construct; identical to SEQ ID NO: 29738
  source 1..101: mol_type = other RNA
  modified_base 1: mod_base = OTHER; note = 2'-O-methyl modified nucleotide with phosphorothioate linkage
  modified_base 2: mod_base = OTHER; note = 2'-O-methyl modified nucleotide with phosphorothioate linkage
  modified_base 3: mod_base = OTHER; note = 2'-O-methyl modified nucleotide with phosphorothioate linkage
  modified_base 33: mod_base = OTHER; note = 2'-O-methyl modified nucleotide
  modified_base 34: mod_base = OTHER; note = 2'-O-methyl modified nucleotide
  modified_base 35: mod_base = OTHER; note = 2'-O-methyl modified nucleotide
  modified_base 36: mod_base = OTHER; note = 2'-O-methyl modified nucleotide
  modified_base 37: mod_base = OTHER; note = 2'-O-methyl modified nucleotide
  modified_base 38: mod_base = OTHER; note = 2'-O-methyl modified nucleotide
  modified_base 39: mod_base = OTHER; note = 2'-O-methyl modified nucleotide
  modified_base 40: mod_base = OTHER; note = 2'-O-methyl modified nucleotide
  modified_base 41: mod_base = OTHER; note = 2'-O-methyl modified nucleotide
  modified_base 42: mod_base = OTHER; note = 2'-O-methyl modified nucleotide
  modified_base 43: mod_base = OTHER; note = 2'-O-methyl modified nucleotide
  modified_base 44: mod_base = OTHER; note = 2'-O-methyl modified nucleotide
  modified_base 45: mod_base = OTHER; note = 2'-O-methyl modified nucleotide
  modified_base 46: mod_base = OTHER; note = 2'-O-methyl modified nucleotide
  modified_base 47: mod_base = OTHER; note = 2'-O-methyl modified nucleotide
  modified_base 48: mod_base = OTHER; note = 2'-O-methyl modified nucleotide
  modified_base 49: mod_base = OTHER; note = 2'-O-methyl modified nucleotide
  modified_base 50: mod_base = OTHER; note = 2'-O-methyl modified nucleotide
  modified_base 63: mod_base = OTHER; note = 2'-O-methyl modified nucleotide
  modified_base 64: mod_base = OTHER; note = 2'-O-methyl modified nucleotide
  modified_base 65: mod_base = OTHER; note = 2'-O-methyl modified nucleotide
  modified_base 98: mod_base = OTHER; note = Nucleotide with phosphorothioate linkage
  modified_base 99: mod_base = OTHER; note = 2'-O-methyl modified nucleotide with phosphorothioate linkage
  modified_base 100: mod_base = OTHER; note = 2'-O-methyl modified nucleotide with phosphorothioate linkage
  modified_base 101: mod_base = OTHER; note = 2'-O-methyl modified nucleotide

SEQ ID NO: 29756 - RNA, 101 nt, synthetic construct
  source 1..101: mol_type = other RNA
  modified_base 1: mod_base = OTHER; note = 2'-O-methyl modified nucleotide with phosphorothioate linkage
  modified_base 2: mod_base = OTHER; note = 2'-O-methyl modified nucleotide with phosphorothioate linkage
  modified_base 3: mod_base = OTHER; note = 2'-O-methyl modified nucleotide with phosphorothioate linkage
  modified_base 33: mod_base = OTHER; note = 2'-O-methyl modified nucleotide
  modified_base 34: mod_base = OTHER; note = 2'-O-methyl modified nucleotide
  modified_base 35: mod_base = OTHER; note = 2'-O-methyl modified nucleotide
  modified_base 36: mod_base = OTHER; note = 2'-O-methyl modified nucleotide
  modified_base 37: mod_base = OTHER; note = 2'-O-methyl modified nucleotide
  modified_base 38: mod_base = OTHER; note = 2'-O-methyl modified nucleotide
  modified_base 39: mod_base = OTHER; note = 2'-O-methyl modified nucleotide
  modified_base 40: mod_base = OTHER; note = 2'-O-methyl modified nucleotide
  modified_base 41: mod_base = OTHER; note = 2'-O-methyl modified nucleotide
  modified_base 42: mod_base = OTHER; note = 2'-O-methyl modified nucleotide
  modified_base 43: mod_base = OTHER; note = 2'-O-methyl modified nucleotide
  modified_base 44: mod_base = OTHER; note = 2'-O-methyl modified nucleotide
  modified_base 45: mod_base = OTHER; note = 2'-O-methyl modified nucleotide
  modified_base 46: mod_base = OTHER; note = 2'-O-methyl modified nucleotide
  modified_base 47: mod_base = OTHER; note = 2'-O-methyl modified nucleotide
  modified_base 48: mod_base = OTHER; note = 2'-O-methyl modified nucleotide
  modified_base 49: mod_base = OTHER; note = 2'-O-methyl modified nucleotide
  modified_base 50: mod_base = OTHER; note = 2'-O-methyl modified nucleotide
  modified_base 63: mod_base = OTHER; note = 2'-O-methyl modified nucleotide
  modified_base 64: mod_base = OTHER; note = 2'-O-methyl modified nucleotide
  modified_base 65: mod_base = OTHER; note = 2'-O-methyl modified nucleotide
  modified_base 98: mod_base = OTHER; note = Nucleotide with phosphorothioate linkage
  modified_base 99: mod_base = OTHER; note = 2'-O-methyl modified nucleotide with phosphorothioate linkage
  modified_base 100: mod_base = OTHER; note = 2'-O-methyl modified nucleotide with phosphorothioate linkage
  modified_base 101: mod_base = OTHER; note = 2'-O-methyl modified nucleotide
taaggctgtgctgaccatcgagtcgttgtactctgcgcggtaacgcgcagaagctacaacgataaggcttcatgccgaaatcatttctcgtcgatggtcag

SEQ ID NO: 29757 - RNA, 101 nt, synthetic construct
  source 1..101: mol_type = other RNA
  modified_base 1: mod_base = OTHER; note = 2'-O-methyl modified nucleotide with phosphorothioate linkage
  modified_base 2: mod_base = OTHER; note = 2'-O-methyl modified nucleotide with phosphorothioate linkage
  modified_base 3: mod_base = OTHER; note = 2'-O-methyl modified nucleotide with phosphorothioate linkage
  modified_base 33: mod_base = OTHER; note = 2'-O-methyl modified nucleotide
  modified_base 34: mod_base = OTHER; note = 2'-O-methyl modified nucleotide
  modified_base 35: mod_base = OTHER; note = 2'-O-methyl modified nucleotide
  modified_base 36: mod_base = OTHER; note = 2'-O-methyl modified nucleotide
  modified_base 37: mod_base = OTHER; note = 2'-O-methyl modified nucleotide
  modified_base 38: mod_base = OTHER; note = 2'-O-methyl modified nucleotide
  modified_base 39: mod_base = OTHER; note = 2'-O-methyl modified nucleotide
  modified_base 40: mod_base = OTHER; note = 2'-O-methyl modified nucleotide
  modified_base 41: mod_base = OTHER; note = 2'-O-methyl modified nucleotide
  modified_base 42: mod_base = OTHER; note = 2'-O-methyl modified nucleotide
  modified_base 43: mod_base = OTHER; note = 2'-O-methyl modified nucleotide
  modified_base 44: mod_base = OTHER; note = 2'-O-methyl modified nucleotide
  modified_base 45: mod_base = OTHER; note = 2'-O-methyl modified nucleotide
  modified_base 46: mod_base = OTHER; note = 2'-O-methyl modified nucleotide
  modified_base 47: mod_base = OTHER; note = 2'-O-methyl modified nucleotide
  modified_base 48: mod_base = OTHER; note = 2'-O-methyl modified nucleotide
  modified_base 49: mod_base = OTHER; note = 2'-O-methyl modified nucleotide
  modified_base 50: mod_base = OTHER; note = 2'-O-methyl modified nucleotide
  modified_base 63: mod_base = OTHER; note = 2'-O-methyl modified nucleotide
  modified_base 64: mod_base = OTHER; note = 2'-O-methyl modified nucleotide
  modified_base 65: mod_base = OTHER; note = 2'-O-methyl modified nucleotide
  modified_base 98: mod_base = OTHER; note = Nucleotide with phosphorothioate linkage
  modified_base 99: mod_base = OTHER; note = 2'-O-methyl modified nucleotide with phosphorothioate linkage
  modified_base 100: mod_base = OTHER; note = 2'-O-methyl modified nucleotide with phosphorothioate linkage
  modified_base 101: mod_base = OTHER; note = 2'-O-methyl modified nucleotide
taaggctgtgctgaccatcgagtctttgtactctgcgcggtaacgcgcagaagctacaaagataaggcttcatgccgaattcatttctcgtcgatggtcag

SEQ ID NO: 29758 - RNA, 101 nt, synthetic construct
  source 1..101: mol_type = other RNA
  modified_base 1: mod_base = OTHER; note = 2'-O-methyl modified nucleotide with phosphorothioate linkage
  modified_base 2: mod_base = OTHER; note = 2'-O-methyl modified nucleotide with phosphorothioate linkage
  modified_base 3: mod_base = OTHER; note = 2'-O-methyl modified nucleotide with phosphorothioate linkage
  modified_base 33: mod_base = OTHER; note = 2'-O-methyl modified nucleotide
  modified_base 34: mod_base = OTHER; note = 2'-O-methyl modified nucleotide
  modified_base 35: mod_base = OTHER; note = 2'-O-methyl modified nucleotide
  modified_base 36: mod_base = OTHER; note = 2'-O-methyl modified nucleotide
  modified_base 37: mod_base = OTHER; note = 2'-O-methyl modified nucleotide
  modified_base 38: mod_base = OTHER; note = 2'-O-methyl modified nucleotide
  modified_base 39: mod_base = OTHER; note = 2'-O-methyl modified nucleotide
  modified_base 40: mod_base = OTHER; note = 2'-O-methyl modified nucleotide
  modified_base 41: mod_base = OTHER; note = 2'-O-methyl modified nucleotide
  modified_base 42: mod_base = OTHER; note = 2'-O-methyl modified nucleotide
  modified_base 43: mod_base = OTHER; note = 2'-O-methyl modified nucleotide
  modified_base 44: mod_base = OTHER; note = 2'-O-methyl modified nucleotide
  modified_base 45: mod_base = OTHER; note = 2'-O-methyl modified nucleotide
  modified_base 46: mod_base = OTHER; note = 2'-O-methyl modified nucleotide
  modified_base 47: mod_base = OTHER; note = 2'-O-methyl modified nucleotide
  modified_base 48: mod_base = OTHER; note = 2'-O-methyl modified nucleotide
  modified_base 49: mod_base = OTHER; note = 2'-O-methyl modified nucleotide
  modified_base 50: mod_base = OTHER; note = 2'-O-methyl modified nucleotide
  modified_base 63: mod_base = OTHER; note = 2'-O-methyl modified nucleotide
  modified_base 64: mod_base = OTHER; note = 2'-O-methyl modified nucleotide
  modified_base 65: mod_base = OTHER; note = 2'-O-methyl modified nucleotide
  modified_base 98: mod_base = OTHER; note = Nucleotide with phosphorothioate linkage
  modified_base 99: mod_base = OTHER; note = 2'-O-methyl modified nucleotide with phosphorothioate linkage
  modified_base 100: mod_base = OTHER; note = 2'-O-methyl modified nucleotide with phosphorothioate linkage
  modified_base 101: mod_base = OTHER; note = 2'-O-methyl modified nucleotide
taaggctgtgctgaccatcgagtctttgtactctgcgcggtaacgcgcagaagctacaaagataaggcttcatgccgaaatcctttctcgtcgatggtcag

SEQ ID NO: 29759 - RNA, 101 nt, synthetic construct
  source 1..101: mol_type = other RNA
  modified_base 1: mod_base = OTHER; note = 2'-O-methyl modified nucleotide with phosphorothioate linkage
  modified_base 2: mod_base = OTHER; note = 2'-O-methyl modified nucleotide with phosphorothioate linkage
  modified_base 3: mod_base = OTHER; note = 2'-O-methyl modified nucleotide with phosphorothioate linkage
  modified_base 33: mod_base = OTHER; note = 2'-O-methyl modified nucleotide
  modified_base 34: mod_base = OTHER; note = 2'-O-methyl modified nucleotide
  modified_base 35: mod_base = OTHER; note = 2'-O-methyl modified nucleotide
  modified_base 36: mod_base = OTHER; note = 2'-O-methyl modified nucleotide
  modified_base 37: mod_base = OTHER; note = 2'-O-methyl modified nucleotide
  modified_base 38: mod_base = OTHER; note = 2'-O-methyl modified nucleotide
  modified_base 39: mod_base = OTHER; note = 2'-O-methyl modified nucleotide
  modified_base 40: mod_base = OTHER; note = 2'-O-methyl modified nucleotide
  modified_base 41: mod_base = OTHER; note = 2'-O-methyl modified nucleotide
  modified_base 42: mod_base = OTHER; note = 2'-O-methyl modified nucleotide
  modified_base 43: mod_base = OTHER; note = 2'-O-methyl modified nucleotide
  modified_base 44: mod_base = OTHER; note = 2'-O-methyl modified nucleotide
  modified_base 45: mod_base = OTHER; note = 2'-O-methyl modified nucleotide
  modified_base 46: mod_base = OTHER; note = 2'-O-methyl modified nucleotide
  modified_base 47: mod_base = OTHER; note = 2'-O-methyl modified nucleotide
  modified_base 48: mod_base = OTHER; note = 2'-O-methyl modified nucleotide
  modified_base 49: mod_base = OTHER; note = 2'-O-methyl modified nucleotide
  modified_base 50: mod_base = OTHER; note = 2'-O-methyl modified nucleotide
  modified_base 63: mod_base = OTHER; note = 2'-O-methyl modified nucleotide
  modified_base 64: mod_base = OTHER; note = 2'-O-methyl modified nucleotide
  modified_base 65: mod_base = OTHER; note = 2'-O-methyl modified nucleotide
  modified_base 98: mod_base = OTHER; note = Nucleotide with phosphorothioate linkage
  modified_base 99: mod_base = OTHER; note = 2'-O-methyl modified nucleotide with phosphorothioate linkage
  modified_base 100: mod_base = OTHER; note = 2'-O-methyl modified nucleotide with phosphorothioate linkage
  modified_base 101: mod_base = OTHER; note = 2'-O-methyl modified nucleotide
taaggctgtgctgaccatcgagtctttgtactctgcgcggtaacgcgcagaagctacaaagataaggcttcatgccgaattcctttctcgtcgatggtcag

SEQ ID NO: 29760 - RNA, 101 nt, synthetic construct
  source 1..101: mol_type = other RNA
  modified_base 1: mod_base = OTHER; note = 2'-O-methyl modified nucleotide with phosphorothioate linkage
  modified_base 2: mod_base = OTHER; note = 2'-O-methyl modified nucleotide with phosphorothioate linkage
  modified_base 3: mod_base = OTHER; note = 2'-O-methyl modified nucleotide with phosphorothioate linkage
  modified_base 33: mod_base = OTHER; note = 2'-O-methyl modified nucleotide
  modified_base 34: mod_base = OTHER; note = 2'-O-methyl modified nucleotide
  modified_base 35: mod_base = OTHER; note = 2'-O-methyl modified nucleotide
  modified_base 36: mod_base = OTHER; note = 2'-O-methyl modified nucleotide
  modified_base 37: mod_base = OTHER; note = 2'-O-methyl modified nucleotide
  modified_base 38: mod_base = OTHER; note = 2'-O-methyl modified nucleotide
  modified_base 39: mod_base = OTHER; note = 2'-O-methyl modified nucleotide
  modified_base 40: mod_base = OTHER; note = 2'-O-methyl modified nucleotide
  modified_base 41: mod_base = OTHER; note = 2'-O-methyl modified nucleotide
  modified_base 42: mod_base = OTHER; note = 2'-O-methyl modified nucleotide
  modified_base 43: mod_base = OTHER; note = 2'-O-methyl modified nucleotide
  modified_base 44: mod_base = OTHER; note = 2'-O-methyl modified nucleotide
  modified_base 45: mod_base = OTHER; note = 2'-O-methyl modified nucleotide
  modified_base 46: mod_base = OTHER; note = 2'-O-methyl modified nucleotide
  modified_base 47: mod_base = OTHER; note = 2'-O-methyl modified nucleotide
  modified_base 48: mod_base = OTHER; note = 2'-O-methyl modified nucleotide
  modified_base 49: mod_base = OTHER; note = 2'-O-methyl modified nucleotide
  modified_base 50: mod_base = OTHER; note = 2'-O-methyl modified nucleotide
  modified_base 63: mod_base = OTHER; note = 2'-O-methyl modified nucleotide
  modified_base 64: mod_base = OTHER; note = 2'-O-methyl modified nucleotide
  modified_base 65: mod_base = OTHER; note = 2'-O-methyl modified nucleotide
  modified_base 98: mod_base = OTHER; note = Nucleotide with phosphorothioate linkage
  modified_base 99: mod_base = OTHER; note = 2'-O-methyl modified nucleotide with phosphorothioate linkage
  modified_base 100: mod_base = OTHER; note = 2'-O-methyl modified nucleotide with phosphorothioate linkage
  modified_base 101: mod_base = OTHER; note = 2'-O-methyl modified nucleotide
taaggctgtgctgaccatcgagtcgttgtactctgcgcggtaacgcgcagaagctacaacgataaggcttcatgccgaaatcctttctcgtcgatggtcag

SEQ ID NO: 29761 - RNA, 101 nt, synthetic construct
  source 1..101: mol_type = other RNA
  modified_base 1: mod_base = OTHER; note = 2'-O-methyl modified nucleotide with phosphorothioate linkage
  modified_base 2: mod_base = OTHER; note = 2'-O-methyl modified nucleotide with phosphorothioate linkage
  modified_base 3: mod_base = OTHER; note = 2'-O-methyl modified nucleotide with phosphorothioate linkage
  modified_base 33: mod_base = OTHER; note = 2'-O-methyl modified nucleotide
  modified_base 34: mod_base = OTHER; note = 2'-O-methyl modified nucleotide
  modified_base 35: mod_base = OTHER; note = 2'-O-methyl modified nucleotide
  modified_base 36: mod_base = OTHER; note = 2'-O-methyl modified nucleotide
  modified_base 37: mod_base = OTHER; note = 2'-O-methyl modified nucleotide
  modified_base 38: mod_base = OTHER; note = 2'-O-methyl modified nucleotide
  modified_base 39: mod_base = OTHER; note = 2'-O-methyl modified nucleotide
  modified_base 40: mod_base = OTHER; note = 2'-O-methyl modified nucleotide
  modified_base 41: mod_base = OTHER; note = 2'-O-methyl modified nucleotide
  modified_base 42: mod_base = OTHER; note = 2'-O-methyl modified nucleotide
  modified_base 43: mod_base = OTHER; note = 2'-O-methyl modified nucleotide
  modified_base 44: mod_base = OTHER; note = 2'-O-methyl modified nucleotide
  modified_base 45: mod_base = OTHER; note = 2'-O-methyl modified nucleotide
  modified_base 46: mod_base = OTHER; note = 2'-O-methyl modified nucleotide
  modified_base 47: mod_base = OTHER; note = 2'-O-methyl modified nucleotide
  modified_base 48: mod_base = OTHER; note = 2'-O-methyl modified nucleotide
  modified_base 49: mod_base = OTHER; note = 2'-O-methyl modified nucleotide
  modified_base 50: mod_base = OTHER; note = 2'-O-methyl modified nucleotide
  modified_base 63: mod_base = OTHER; note = 2'-O-methyl modified nucleotide
  modified_base 64: mod_base = OTHER; note = 2'-O-methyl modified nucleotide
  modified_base 65: mod_base = OTHER; note = 2'-O-methyl modified nucleotide
  modified_base 98: mod_base = OTHER; note = Nucleotide with phosphorothioate linkage
  modified_base 99: mod_base = OTHER; note = 2'-O-methyl modified nucleotide with phosphorothioate linkage
  modified_base 100: mod_base = OTHER; note = 2'-O-methyl modified nucleotide with phosphorothioate linkage
  modified_base 101: mod_base = OTHER; note = 2'-O-methyl modified nucleotide
taaggctgtgctgaccatcgagtcgttgtactctgcgcggtaacgcgcagaagctacaacgataaggcttcatgccgaattcatttctcgtcgatggtcag

SEQ ID NO: 29762 - RNA, 101 nt, synthetic construct
  source 1..101: mol_type = other RNA
  modified_base 1: mod_base = OTHER; note = 2'-O-methyl modified nucleotide with phosphorothioate linkage
  modified_base 2: mod_base = OTHER; note = 2'-O-methyl modified nucleotide with phosphorothioate linkage
  modified_base 3: mod_base = OTHER; note = 2'-O-methyl modified nucleotide with phosphorothioate linkage
  modified_base 33: mod_base = OTHER; note = 2'-O-methyl modified nucleotide
  modified_base 34: mod_base = OTHER; note = 2'-O-methyl modified nucleotide
  modified_base 35: mod_base = OTHER; note = 2'-O-methyl modified nucleotide
  modified_base 36: mod_base = OTHER; note = 2'-O-methyl modified nucleotide
  modified_base 37: mod_base = OTHER; note = 2'-O-methyl modified nucleotide
  modified_base 38: mod_base = OTHER; note = 2'-O-methyl modified nucleotide
  modified_base 39: mod_base = OTHER; note = 2'-O-methyl modified nucleotide
  modified_base 40: mod_base = OTHER; note = 2'-O-methyl modified nucleotide
  modified_base 41: mod_base = OTHER; note = 2'-O-methyl modified nucleotide
  modified_base 42: mod_base = OTHER; note = 2'-O-methyl modified nucleotide
  modified_base 43: mod_base = OTHER; note = 2'-O-methyl modified nucleotide
  modified_base 44: mod_base = OTHER; note = 2'-O-methyl modified nucleotide
  modified_base 45: mod_base = OTHER; note = 2'-O-methyl modified nucleotide
  modified_base 46: mod_base = OTHER; note = 2'-O-methyl modified nucleotide
  modified_base 47: mod_base = OTHER; note = 2'-O-methyl modified nucleotide
  modified_base 48: mod_base = OTHER; note = 2'-O-methyl modified nucleotide
  modified_base 49: mod_base = OTHER; note = 2'-O-methyl modified nucleotide
  modified_base 50: mod_base = OTHER; note = 2'-O-methyl modified nucleotide
  modified_base 63: mod_base = OTHER; note = 2'-O-methyl modified nucleotide
  modified_base 64: mod_base = OTHER; note = 2'-O-methyl modified nucleotide
  modified_base 65: mod_base = OTHER; note = 2'-O-methyl modified nucleotide
  modified_base 98: mod_base = OTHER; note = Nucleotide with phosphorothioate linkage
  modified_base 99: mod_base = OTHER; note = 2'-O-methyl modified nucleotide with phosphorothioate linkage
  modified_base 100: mod_base = OTHER; note = 2'-O-methyl modified nucleotide with phosphorothioate linkage
  modified_base 101: mod_base = OTHER; note = 2'-O-methyl modified nucleotide
taaggctgtgctgaccatcgagtcgttgtactctgcgcggtaacgcgcagaagctacaacgataaggcttcatgccgaattcctttctcgtcgatggtcag

SEQ ID NO: 29763 - RNA, 101 nt, synthetic construct
  source 1..101: mol_type = other RNA
  modified_base 1: mod_base = OTHER; note = 2'-O-methyl modified nucleotide with phosphorothioate linkage
  modified_base 2: mod_base = OTHER; note = 2'-O-methyl modified nucleotide with phosphorothioate linkage
  modified_base 3: mod_base = OTHER; note = 2'-O-methyl modified nucleotide with phosphorothioate linkage
  modified_base 33: mod_base = OTHER; note = 2'-O-methyl modified nucleotide
  modified_base 34: mod_base = OTHER; note = 2'-O-methyl modified nucleotide
  modified_base 35: mod_base = OTHER; note = 2'-O-methyl modified nucleotide
  modified_base 36: mod_base = OTHER; note = 2'-O-methyl modified nucleotide
  modified_base 37: mod_base = OTHER; note = 2'-O-methyl modified nucleotide
  modified_base 38: mod_base = OTHER; note = 2'-O-methyl modified nucleotide
  modified_base 39: mod_base = OTHER; note = 2'-O-methyl modified nucleotide
  modified_base 40: mod_base = OTHER; note = 2'-O-methyl modified nucleotide
  modified_base 41: mod_base = OTHER; note = 2'-O-methyl modified nucleotide
  modified_base 42: mod_base = OTHER; note = 2'-O-methyl modified nucleotide
  modified_base 43: mod_base = OTHER; note = 2'-O-methyl modified nucleotide
  modified_base 44: mod_base = OTHER; note = 2'-O-methyl modified nucleotide
  modified_base 45: mod_base = OTHER; note = 2'-O-methyl modified nucleotide
  modified_base 46: mod_base = OTHER; note = 2'-O-methyl modified nucleotide
  modified_base 47: mod_base = OTHER; note = 2'-O-methyl modified nucleotide
  modified_base 48: mod_base = OTHER; note = 2'-O-methyl modified nucleotide
  modified_base 49: mod_base = OTHER; note = 2'-O-methyl modified nucleotide
  modified_base 50: mod_base = OTHER; note = 2'-O-methyl modified nucleotide
  modified_base 63: mod_base = OTHER; note = 2'-O-methyl modified nucleotide
  modified_base 64: mod_base = OTHER; note = 2'-O-methyl modified nucleotide
  modified_base 65: mod_base = OTHER; note = 2'-O-methyl modified nucleotide
  modified_base 98: mod_base = OTHER; note = Nucleotide with phosphorothioate linkage
  modified_base 99: mod_base = OTHER; note = 2'-O-methyl modified nucleotide with phosphorothioate linkage
  modified_base 100: mod_base = OTHER; note = 2'-O-methyl modified nucleotide with phosphorothioate linkage
  modified_base 101: mod_base = OTHER; note = 2'-O-methyl modified nucleotide
taaggctgtgctgaccatcgagtcgtagtactctgggacttcggtcccagaagctactacgataaggcttcatgccgaaatcatttctcgtcgatggtcag

SEQ ID NO: 29764 - RNA, 101 nt, synthetic construct
  source 1..101: mol_type = other RNA
  modified_base 1: mod_base = OTHER; note = 2'-O-methyl modified nucleotide with phosphorothioate linkage
  modified_base 2: mod_base = OTHER; note = 2'-O-methyl modified nucleotide with phosphorothioate linkage
  modified_base 3: mod_base = OTHER; note = 2'-O-methyl modified nucleotide with phosphorothioate linkage
  modified_base 33: mod_base = OTHER; note = 2'-O-methyl modified nucleotide
  modified_base 34: mod_base = OTHER; note = 2'-O-methyl modified nucleotide
  modified_base 35: mod_base = OTHER; note = 2'-O-methyl modified nucleotide
  modified_base 36: mod_base = OTHER; note = 2'-O-methyl modified nucleotide
  modified_base 37: mod_base = OTHER; note = 2'-O-methyl modified nucleotide
  modified_base 38: mod_base = OTHER; note = 2'-O-methyl modified nucleotide
  modified_base 39: mod_base = OTHER; note = 2'-O-methyl modified nucleotide
  modified_base 40: mod_base = OTHER; note = 2'-O-methyl modified nucleotide
  modified_base 41: mod_base = OTHER; note = 2'-O-methyl modified nucleotide
  modified_base 42: mod_base = OTHER; note = 2'-O-methyl modified nucleotide
  modified_base 43: mod_base = OTHER; note = 2'-O-methyl modified nucleotide
  modified_base 44: mod_base = OTHER; note = 2'-O-methyl modified nucleotide
  modified_base 45: mod_base = OTHER; note = 2'-O-methyl modified nucleotide
  modified_base 46: mod_base = OTHER; note = 2'-O-methyl modified nucleotide
  modified_base 47: mod_base = OTHER; note = 2'-O-methyl modified nucleotide
  modified_base 48: mod_base = OTHER; note = 2'-O-methyl modified nucleotide
  modified_base 49: mod_base = OTHER; note = 2'-O-methyl modified nucleotide
  modified_base 50: mod_base = OTHER; note = 2'-O-methyl modified nucleotide
  modified_base 63: mod_base = OTHER; note = 2'-O-methyl modified nucleotide
  modified_base 64: mod_base = OTHER; note = 2'-O-methyl modified nucleotide
  modified_base 65: mod_base = OTHER; note = 2'-O-methyl modified nucleotide
  modified_base 98: mod_base = OTHER; note = Nucleotide with phosphorothioate linkage
  modified_base 99: mod_base = OTHER; note = 2'-O-methyl modified nucleotide with phosphorothioate linkage
  modified_base 100: mod_base = OTHER; note = 2'-O-methyl modified nucleotide with phosphorothioate linkage
  modified_base 101: mod_base = OTHER; note = 2'-O-methyl modified nucleotide
taaggctgtgctgaccatcgagtcgttgtactctaggacttcggtcctagaagctacaacgataaggcttcatgccgaaatcatttctcgtcgatggtcag

SEQ ID NO: 29765 - RNA, 101 nt, synthetic construct; identical to SEQ ID NO: 29730
  source 1..101: mol_type = other RNA

SEQ ID NO: 29766 - RNA, 101 nt, synthetic construct; identical to SEQ ID NO: 29731
  source 1..101: mol_type = other RNA

SEQ ID NO: 29767 - RNA, 101 nt, synthetic construct; identical to SEQ ID NO: 29741
  source 1..101: mol_type = other RNA

SEQ ID NO: 29768 - RNA, 101 nt, synthetic construct; identical to SEQ ID NO: 29742
  source 1..101: mol_type = other RNA

SEQ ID NO: 29769 - RNA, 101 nt, synthetic construct; identical to SEQ ID NO: 29743
  source 1..101: mol_type = other RNA

SEQ ID NO: 29770 - RNA, 101 nt, synthetic construct; identical to SEQ ID NO: 29744
  source 1..101: mol_type = other RNA

SEQ ID NO: 29771 - RNA, 101 nt, synthetic construct; identical to SEQ ID NO: 29745
  source 1..101: mol_type = other RNA

SEQ ID NO: 29772 - RNA, 101 nt, synthetic construct; identical to SEQ ID NO: 29746
  source 1..101: mol_type = other RNA

SEQ ID NO: 29773 - RNA, 101 nt, synthetic construct; identical to SEQ ID NO: 29733
  source 1..101: mol_type = other RNA

SEQ ID NO: 29774 - RNA, 101 nt, synthetic construct; identical to SEQ ID NO: 29748
  source 1..101: mol_type = other RNA

SEQ ID NO: 29775 - RNA, 101 nt, synthetic construct; identical to SEQ ID NO: 29749
  source 1..101: mol_type = other RNA

SEQ ID NO: 29776 - RNA, 101 nt, synthetic construct; identical to SEQ ID NO: 29750
  source 1..101: mol_type = other RNA

SEQ ID NO: 29777 - RNA, 101 nt, synthetic construct; identical to SEQ ID NO: 29751
  source 1..101: mol_type = other RNA

SEQ ID NO: 29778 - RNA, 101 nt, synthetic construct; identical to SEQ ID NO: 29752
  source 1..101: mol_type = other RNA

SEQ ID NO: 29779 - RNA, 101 nt, synthetic construct; identical to SEQ ID NO: 29753
  source 1..101: mol_type = other RNA

SEQ ID NO: 29780 - RNA, 101 nt, synthetic construct; identical to SEQ ID NO: 29754
  source 1..101: mol_type = other RNA

SEQ ID NO: 29781 - RNA, 101 nt, synthetic construct; identical to SEQ ID NO: 29738
  source 1..101: mol_type = other RNA

SEQ ID NO: 29782 - RNA, 101 nt, synthetic construct; identical to SEQ ID NO: 29756
  source 1..101: mol_type = other RNA

SEQ ID NO: 29783 - RNA, 101 nt, synthetic construct; identical to SEQ ID NO: 29757
  source 1..101: mol_type = other RNA

SEQ ID NO: 29784 - RNA, 101 nt, synthetic construct; identical to SEQ ID NO: 29758
  source 1..101: mol_type = other RNA

SEQ ID NO: 29785 - RNA, 101 nt, synthetic construct; identical to SEQ ID NO: 29759
  source 1..101: mol_type = other RNA

SEQ ID NO: 29786 - RNA, 101 nt, synthetic construct; identical to SEQ ID NO: 29760
  source 1..101: mol_type = other RNA

SEQ ID NO: 29787 - RNA, 101 nt, synthetic construct; identical to SEQ ID NO: 29761
  source 1..101: mol_type = other RNA

SEQ ID NO: 29788 - RNA, 101 nt, synthetic construct; identical to SEQ ID NO: 29762
  source 1..101: mol_type = other RNA

SEQ ID NO: 29789 - RNA, 101 nt, synthetic construct; identical to SEQ ID NO: 29763
  source 1..101: mol_type = other RNA

SEQ ID NO: 29790 - RNA, 101 nt, synthetic construct; identical to SEQ ID NO: 29764
  source 1..101: mol_type = other RNA

SEQ ID NO: 29791 - RNA, 108 nt, synthetic construct
  source 1..108: mol_type = other RNA
  modified_base 1: mod_base = OTHER; note = 2'-O-methyl modified nucleotide with phosphorothioate linkage
  modified_base 2: mod_base = OTHER; note = 2'-O-methyl modified nucleotide with phosphorothioate linkage
  modified_base 3: mod_base = OTHER; note = 2'-O-methyl modified nucleotide with phosphorothioate linkage
  modified_base 33: mod_base = OTHER; note = 2'-O-methyl modified nucleotide
  modified_base 34: mod_base = OTHER; note = 2'-O-methyl modified nucleotide
  modified_base 35: mod_base = OTHER; note = 2'-O-methyl modified nucleotide
  modified_base 36: mod_base = OTHER; note = 2'-O-methyl modified nucleotide
  modified_base 37: mod_base = OTHER; note = 2'-O-methyl modified nucleotide
  modified_base 38: mod_base = OTHER; note = 2'-O-methyl modified nucleotide
  modified_base 39: mod_base = OTHER; note = 2'-O-methyl modified nucleotide
  modified_base 40: mod_base = OTHER; note = 2'-O-methyl modified nucleotide
  modified_base 41: mod_base = OTHER; note = 2'-O-methyl modified nucleotide
  modified_base 42: mod_base = OTHER; note = 2'-O-methyl modified nucleotide
  modified_base 43: mod_base = OTHER; note = 2'-O-methyl modified nucleotide
  modified_base 44: mod_base = OTHER; note = 2'-O-methyl modified nucleotide
  modified_base 45: mod_base = OTHER; note = 2'-O-methyl modified nucleotide
  modified_base 46: mod_base = OTHER; note = 2'-O-methyl modified nucleotide
  modified_base 47: mod_base = OTHER; note = 2'-O-methyl modified nucleotide
  modified_base 48: mod_base = OTHER; note = 2'-O-methyl modified nucleotide
  modified_base 49: mod_base = OTHER; note = 2'-O-methyl modified nucleotide
  modified_base 50: mod_base = OTHER; note = 2'-O-methyl modified nucleotide
  modified_base 63: mod_base = OTHER; note = 2'-O-methyl modified nucleotide
  modified_base 64: mod_base = OTHER; note = 2'-O-methyl modified nucleotide
  modified_base 65: mod_base = OTHER; note = 2'-O-methyl modified nucleotide
  modified_base 66: mod_base = OTHER; note = 2'-fluoro modified nucleotide
  modified_base 67: mod_base = OTHER; note = 2'-fluoro modified nucleotide
  modified_base 68: mod_base = OTHER; note = 2'-fluoro modified nucleotide
  modified_base 69: mod_base = OTHER; note = 2'-fluoro modified nucleotide
  modified_base 70: mod_base = OTHER; note = 2'-fluoro modified nucleotide
  modified_base 71: mod_base = OTHER; note = 2'-fluoro modified nucleotide
  modified_base 74: mod_base = OTHER; note = 2'-fluoro modified nucleotide
  modified_base 75: mod_base = OTHER; note = 2'-fluoro modified nucleotide
  modified_base 76: mod_base = OTHER; note = 2'-fluoro modified nucleotide
  modified_base 105: mod_base = OTHER; note = Nucleotide with phosphorothioate linkage
  modified_base 106: mod_base = OTHER; note = 2'-O-methyl modified nucleotide with phosphorothioate linkage
  modified_base 107: mod_base = OTHER; note = 2'-O-methyl modified nucleotide with phosphorothioate linkage
  modified_base 108: mod_base = OTHER; note = 2'-O-methyl modified nucleotide
tgagacatgcttccagtacacgtctttgtactctgggacttcggtcccagaagctacaaagataaggcttcatgccgaaatcatgagattccaggtgtactggaagca

SEQ ID NO: 29792 - RNA, 108 nt, synthetic construct
  source 1..108: mol_type = other RNA
  modified_base 1: mod_base = OTHER; note = 2'-O-methyl modified nucleotide with phosphorothioate linkage
  modified_base 2: mod_base = OTHER; note = 2'-O-methyl modified nucleotide with phosphorothioate linkage
  modified_base 3: mod_base = OTHER; note = 2'-O-methyl modified nucleotide with phosphorothioate linkage
  modified_base 33: mod_base = OTHER; note = 2'-O-methyl modified nucleotide
  modified_base 34: mod_base = OTHER; note = 2'-O-methyl modified nucleotide
  modified_base 35: mod_base = OTHER; note = 2'-O-methyl modified nucleotide
  modified_base 36: mod_base = OTHER; note = 2'-O-methyl modified nucleotide
  modified_base 37: mod_base = OTHER; note = 2'-O-methyl modified nucleotide
  modified_base 38: mod_base = OTHER; note = 2'-O-methyl modified nucleotide
  modified_base 39: mod_base = OTHER; note = 2'-O-methyl modified nucleotide
  modified_base 40: mod_base = OTHER; note = 2'-O-methyl modified nucleotide
  modified_base 41: mod_base = OTHER; note = 2'-O-methyl modified nucleotide
  modified_base 42: mod_base = OTHER; note = 2'-O-methyl modified nucleotide
  modified_base 43: mod_base = OTHER; note = 2'-O-methyl modified nucleotide
  modified_base 44: mod_base = OTHER; note = 2'-O-methyl modified nucleotide
  modified_base 45: mod_base = OTHER; note = 2'-O-methyl modified nucleotide
  modified_base 46: mod_base = OTHER; note = 2'-O-methyl modified nucleotide
  modified_base 47: mod_base = OTHER; note = 2'-O-methyl modified nucleotide
  modified_base 48: mod_base = OTHER; note = 2'-O-methyl modified nucleotide
  modified_base 49: mod_base = OTHER; note = 2'-O-methyl modified nucleotide
  modified_base 50: mod_base = OTHER; note = 2'-O-methyl modified nucleotide
  modified_base 63: mod_base = OTHER; note = 2'-O-methyl modified nucleotide
  modified_base 64: mod_base = OTHER; note = 2'-O-methyl modified nucleotide
  modified_base 65: mod_base = OTHER; note = 2'-O-methyl modified nucleotide
  modified_base 66: mod_base = OTHER; note = 2'-fluoro modified nucleotide
  modified_base 67: mod_base = OTHER; note = 2'-fluoro modified nucleotide
  modified_base 68: mod_base = OTHER; note = 2'-fluoro modified nucleotide
  modified_base 69: mod_base = OTHER; note = 2'-fluoro modified nucleotide
  modified_base 70: mod_base = OTHER; note = 2'-fluoro modified nucleotide
  modified_base 71: mod_base = OTHER; note = 2'-fluoro modified nucleotide
  modified_base 74: mod_base = OTHER; note = 2'-fluoro modified nucleotide
  modified_base 75: mod_base = OTHER; note = 2'-fluoro modified nucleotide
  modified_base 76: mod_base = OTHER; note = 2'-fluoro modified nucleotide
  modified_base 105: mod_base = OTHER; note = Nucleotide with phosphorothioate linkage
  modified_base 106: mod_base = OTHER; note = 2'-O-methyl modified nucleotide with phosphorothioate linkage
  modified_base 107: mod_base = OTHER; note = 2'-O-methyl modified nucleotide with phosphorothioate linkage
  modified_base 108: mod_base = OTHER; note = 2'-O-methyl modified nucleotide
tgagacatgcttccagtacacgtctttgtactctggctagaaatagccagaagctacaaagataaggcttcatgccgaaatcatgagattccaggtgtactggaagca

SEQ ID NO: 29793 - RNA, 108 nt, synthetic construct
  source 1..108: mol_type = other RNA
  modified_base 1: mod_base = OTHER; note = 2'-O-methyl modified nucleotide with phosphorothioate linkage
  modified_base 2: mod_base = OTHER; note = 2'-O-methyl modified nucleotide with phosphorothioate linkage
  modified_base 3: mod_base = OTHER; note = 2'-O-methyl modified nucleotide with phosphorothioate linkage
  modified_base 33: mod_base = OTHER; note = 2'-O-methyl modified nucleotide
  modified_base 34: mod_base = OTHER; note = 2'-O-methyl modified nucleotide
  modified_base 35: mod_base = OTHER; note = 2'-O-methyl modified nucleotide
  modified_base 36: mod_base = OTHER; note = 2'-O-methyl modified nucleotide
  modified_base 37: mod_base = OTHER; note = 2'-O-methyl modified nucleotide
  modified_base 38: mod_base = OTHER; note = 2'-O-methyl modified nucleotide
  modified_base 39: mod_base = OTHER; note = 2'-O-methyl modified nucleotide
  modified_base 40: mod_base = OTHER; note = 2'-O-methyl modified nucleotide
  modified_base 41: mod_base = OTHER; note = 2'-O-methyl modified nucleotide
  modified_base 42: mod_base = OTHER; note = 2'-O-methyl modified nucleotide
  modified_base 43: mod_base = OTHER; note = 2'-O-methyl modified nucleotide
  modified_base 44: mod_base = OTHER; note = 2'-O-methyl modified nucleotide
  modified_base 45: mod_base = OTHER; note = 2'-O-methyl modified nucleotide
  modified_base 46: mod_base = OTHER; note = 2'-O-methyl modified nucleotide
  modified_base 47: mod_base = OTHER; note = 2'-O-methyl modified nucleotide
  modified_base 48: mod_base = OTHER; note = 2'-O-methyl modified nucleotide
  modified_base 49: mod_base = OTHER; note = 2'-O-methyl modified nucleotide
  modified_base 50: mod_base = OTHER; note = 2'-O-methyl modified nucleotide
  modified_base 63: mod_base = OTHER; note = 2'-O-methyl modified nucleotide
  modified_base 64: mod_base = OTHER; note = 2'-O-methyl modified nucleotide
  modified_base 65: mod_base = OTHER; note = 2'-O-methyl modified nucleotide
  modified_base 66: mod_base = OTHER; note = 2'-fluoro modified nucleotide
  modified_base 67: mod_base = OTHER; note = 2'-fluoro modified nucleotide
  modified_base 68: mod_base = OTHER; note = 2'-fluoro modified nucleotide
  modified_base 69: mod_base = OTHER; note = 2'-fluoro modified nucleotide
  modified_base 70: mod_base = OTHER; note = 2'-fluoro modified nucleotide
  modified_base 71: mod_base = OTHER; note = 2'-fluoro modified nucleotide
  modified_base 74: mod_base = OTHER; note = 2'-fluoro modified nucleotide
  modified_base 75: mod_base = OTHER; note = 2'-fluoro modified nucleotide
  modified_base 76: mod_base = OTHER; note = 2'-fluoro modified nucleotide
  modified_base 105: mod_base = OTHER; note = Nucleotide with phosphorothioate linkage
  modified_base 106: mod_base = OTHER; note = 2'-O-methyl modified nucleotide with phosphorothioate linkage
  modified_base 107: mod_base = OTHER; note = 2'-O-methyl modified nucleotide with phosphorothioate linkage
  modified_base 108: mod_base = OTHER; note = 2'-O-methyl modified nucleotide
tgagacatgcttccagtacacgtctttgtactctgcgcggtaacgcgcagaagctacaaagataaggcttcatgccgaaatcatgagattccaggtgtactggaagca

SEQ ID NO: 29794 - RNA, 108 nt, synthetic construct
  source 1..108: mol_type = other RNA
  modified_base 1: mod_base = OTHER; note = 2'-O-methyl modified nucleotide with phosphorothioate linkage
  modified_base 2: mod_base = OTHER; note = 2'-O-methyl modified nucleotide with phosphorothioate linkage
  modified_base 3: mod_base = OTHER; note = 2'-O-methyl modified nucleotide with phosphorothioate linkage
  modified_base 33: mod_base = OTHER; note = 2'-O-methyl modified nucleotide
  modified_base 34: mod_base = OTHER; note = 2'-O-methyl modified nucleotide
  modified_base 35: mod_base = OTHER; note = 2'-O-methyl modified nucleotide
  modified_base 36: mod_base = OTHER; note = 2'-O-methyl modified nucleotide
  modified_base 37: mod_base = OTHER; note = 2'-O-methyl modified nucleotide
  modified_base 38: mod_base = OTHER; note = 2'-O-methyl modified nucleotide
  modified_base 39: mod_base = OTHER; note = 2'-O-methyl modified nucleotide
  modified_base 40: mod_base = OTHER; note = 2'-O-methyl modified nucleotide
  modified_base 41: mod_base = OTHER; note = 2'-O-methyl modified nucleotide
  modified_base 42: mod_base = OTHER; note = 2'-O-methyl modified nucleotide
  modified_base 43: mod_base = OTHER; note = 2'-O-methyl modified nucleotide
  modified_base 44: mod_base = OTHER; note = 2'-O-methyl modified nucleotide
  modified_base 45: mod_base = OTHER; note = 2'-O-methyl modified nucleotide
  modified_base 46: mod_base = OTHER; note = 2'-O-methyl modified nucleotide
  modified_base 47: mod_base = OTHER; note = 2'-O-methyl modified nucleotide
  modified_base 48: mod_base = OTHER; note = 2'-O-methyl modified nucleotide
  modified_base 49: mod_base = OTHER; note = 2'-O-methyl modified nucleotide
  modified_base 50: mod_base = OTHER; note = 2'-O-methyl modified nucleotide
  modified_base 63: mod_base = OTHER; note = 2'-O-methyl modified nucleotide
  modified_base 64: mod_base = OTHER; note = 2'-O-methyl modified nucleotide
  modified_base 65: mod_base = OTHER; note = 2'-O-methyl modified nucleotide
  modified_base 66: mod_base = OTHER; note = 2'-fluoro modified nucleotide
  modified_base 67: mod_base = OTHER; note = 2'-fluoro modified nucleotide
  modified_base 68: mod_base = OTHER; note = 2'-fluoro modified nucleotide
  modified_base 69: mod_base = OTHER; note = 2'-fluoro modified nucleotide
  modified_base 70: mod_base = OTHER; note = 2'-fluoro modified nucleotide
  modified_base 71: mod_base = OTHER; note = 2'-fluoro modified nucleotide
  modified_base 74: mod_base = OTHER; note = 2'-fluoro modified nucleotide
  modified_base 75: mod_base = OTHER; note = 2'-fluoro modified nucleotide
  modified_base 76: mod_base = OTHER; note = 2'-fluoro modified nucleotide
  modified_base 105: mod_base = OTHER; note = Nucleotide with phosphorothioate linkage
  modified_base 106: mod_base = OTHER; note = 2'-O-methyl modified nucleotide with phosphorothioate linkage
  modified_base 107: mod_base = OTHER; note = 2'-O-methyl modified nucleotide with phosphorothioate linkage
  modified_base 108: mod_base = OTHER; note = 2'-O-methyl modified nucleotide
tgagacatgcttccagtacacgtctttgtactctgggacttcggtcccagaagctacaaagataaggcttcatgccgaaatcctgagattccaggtgtactggaagca

SEQ ID NO: 29795 - RNA, 108 nt, synthetic construct
  source 1..108: mol_type = other RNA
  modified_base 1: mod_base = OTHER; note = 2'-O-methyl modified nucleotide with phosphorothioate linkage
  modified_base 2: mod_base = OTHER; note = 2'-O-methyl modified nucleotide with phosphorothioate linkage
  modified_base 3: mod_base = OTHER; note = 2'-O-methyl modified nucleotide with phosphorothioate linkage
  modified_base 33: mod_base = OTHER; note = 2'-O-methyl modified nucleotide
  modified_base 34: mod_base = OTHER; note = 2'-O-methyl modified nucleotide
  modified_base 35: mod_base = OTHER; note = 2'-O-methyl modified nucleotide
  modified_base 36: mod_base = OTHER; note = 2'-O-methyl modified nucleotide
  modified_base 37: mod_base = OTHER; note = 2'-O-methyl modified nucleotide
  modified_base 38: mod_base = OTHER; note = 2'-O-methyl modified nucleotide
  modified_base 39: mod_base = OTHER; note = 2'-O-methyl modified nucleotide
  modified_base 40: mod_base = OTHER; note = 2'-O-methyl modified nucleotide
  modified_base 41: mod_base = OTHER; note = 2'-O-methyl modified nucleotide
  modified_base 42: mod_base = OTHER; note = 2'-O-methyl modified nucleotide
  modified_base 43: mod_base = OTHER; note = 2'-O-methyl modified nucleotide
  modified_base 44: mod_base = OTHER; note = 2'-O-methyl modified nucleotide
  modified_base 45: mod_base = OTHER; note = 2'-O-methyl modified nucleotide
  modified_base 46: mod_base = OTHER; note = 2'-O-methyl modified nucleotide
  modified_base 47: mod_base = OTHER; note = 2'-O-methyl modified nucleotide
  modified_base 48: mod_base = OTHER; note = 2'-O-methyl modified nucleotide
  modified_base 49: mod_base = OTHER; note = 2'-O-methyl modified nucleotide
  modified_base 50: mod_base = OTHER; note = 2'-O-methyl modified nucleotide
  modified_base 63: mod_base = OTHER; note = 2'-O-methyl modified nucleotide
  modified_base 64: mod_base = OTHER; note = 2'-O-methyl modified nucleotide
  modified_base 65: mod_base = OTHER; note = 2'-O-methyl modified nucleotide
  modified_base 66: mod_base = OTHER; note = 2'-fluoro modified nucleotide
  modified_base 67: mod_base = OTHER; note = 2'-fluoro modified nucleotide
  modified_base 68: mod_base = OTHER; note = 2'-fluoro modified nucleotide
  modified_base 69: mod_base = OTHER; note = 2'-fluoro modified nucleotide
  modified_base 70: mod_base = OTHER; note = 2'-fluoro modified nucleotide
  modified_base 71: mod_base = OTHER; note = 2'-fluoro modified nucleotide
  modified_base 74: mod_base = OTHER; note = 2'-fluoro modified nucleotide
  modified_base 75: mod_base = OTHER; note = 2'-fluoro modified nucleotide
  modified_base 76: mod_base = OTHER; note = 2'-fluoro modified nucleotide
  modified_base 105: mod_base = OTHER; note = Nucleotide with phosphorothioate linkage
  modified_base 106: mod_base = OTHER; note = 2'-O-methyl modified nucleotide with phosphorothioate linkage
  modified_base 107: mod_base = OTHER; note = 2'-O-methyl modified nucleotide with phosphorothioate linkage
  modified_base 108: mod_base = OTHER; note = 2'-O-methyl modified nucleotide
tgagacatgcttccagtacacgtctttgtactctgggacttcggtcccagaagctacaaagataaggcttcatgccgaattcatgagattccaggtgtactggaagca

SEQ ID NO: 29796 - RNA, 108 nt, synthetic construct
  source 1..108: mol_type = other RNA
  modified_base 1: mod_base = OTHER; note = 2'-O-methyl modified nucleotide with phosphorothioate linkage
  modified_base 2: mod_base = OTHER; note = 2'-O-methyl modified nucleotide with phosphorothioate linkage
  modified_base 3: mod_base = OTHER; note = 2'-O-methyl modified nucleotide with phosphorothioate linkage
  modified_base 33: mod_base = OTHER; note = 2'-O-methyl modified nucleotide
  modified_base 34: mod_base = OTHER; note = 2'-O-methyl modified nucleotide
  modified_base 35: mod_base = OTHER; note = 2'-O-methyl modified nucleotide
  modified_base 36: mod_base = OTHER; note = 2'-O-methyl modified nucleotide
  modified_base 37: mod_base = OTHER; note = 2'-O-methyl modified nucleotide
  modified_base 38: mod_base = OTHER; note = 2'-O-methyl modified nucleotide
  modified_base 39: mod_base = OTHER; note = 2'-O-methyl modified nucleotide
  modified_base 40: mod_base = OTHER; note = 2'-O-methyl modified nucleotide
  modified_base 41: mod_base = OTHER; note = 2'-O-methyl modified nucleotide
  modified_base 42: mod_base = OTHER; note = 2'-O-methyl modified nucleotide
  modified_base 43: mod_base = OTHER; note = 2'-O-methyl modified nucleotide
  modified_base 44: mod_base = OTHER; note = 2'-O-methyl modified nucleotide
  modified_base 45: mod_base = OTHER; note = 2'-O-methyl modified nucleotide
  modified_base 46: mod_base = OTHER; note = 2'-O-methyl modified nucleotide
  modified_base 47: mod_base = OTHER; note = 2'-O-methyl modified nucleotide
  modified_base 48: mod_base = OTHER; note = 2'-O-methyl modified nucleotide
  modified_base 49: mod_base = OTHER; note = 2'-O-methyl modified nucleotide
  modified_base 50: mod_base = OTHER; note = 2'-O-methyl modified nucleotide
  modified_base 63: mod_base = OTHER; note = 2'-O-methyl modified nucleotide
  modified_base 64: mod_base = OTHER; note = 2'-O-methyl modified nucleotide
  modified_base 65: mod_base = OTHER; note = 2'-O-methyl modified nucleotide
  modified_base 66: mod_base = OTHER; note = 2'-fluoro modified nucleotide
  modified_base 67: mod_base = OTHER; note = 2'-fluoro modified nucleotide
  modified_base 68: mod_base = OTHER; note = 2'-fluoro modified nucleotide
  modified_base 69: mod_base = OTHER; note = 2'-fluoro modified nucleotide
  modified_base 70: mod_base = OTHER; note = 2'-fluoro modified nucleotide
  modified_base 71: mod_base = OTHER; note = 2'-fluoro modified nucleotide
  modified_base 74: mod_base = OTHER; note = 2'-fluoro modified nucleotide
  modified_base 75: mod_base = OTHER; note = 2'-fluoro modified nucleotide
  modified_base 76: mod_base = OTHER; note = 2'-fluoro modified nucleotide
  modified_base 105: mod_base = OTHER; note = Nucleotide with phosphorothioate linkage
  modified_base 106: mod_base = OTHER; note = 2'-O-methyl modified nucleotide with phosphorothioate linkage
  modified_base 107: mod_base = OTHER; note = 2'-O-methyl modified nucleotide with phosphorothioate linkage
  modified_base 108: mod_base = OTHER; note = 2'-O-methyl modified nucleotide
tgagacatgcttccagtacacgtctttgtactctgggacttcggtcccagaagctacaaagataaggcttcatgccgaattcctgagattccaggtgtactggaagca

SEQ ID NO: 29797 - RNA, 108 nt, synthetic construct
  source 1..108: mol_type = other RNA
  modified_base 1: mod_base = OTHER; note = 2'-O-methyl modified nucleotide with phosphorothioate linkage
  modified_base 2: mod_base = OTHER; note = 2'-O-methyl modified nucleotide with phosphorothioate linkage
  modified_base 3: mod_base = OTHER; note = 2'-O-methyl modified nucleotide with phosphorothioate linkage
  modified_base 33: mod_base = OTHER; note = 2'-O-methyl modified nucleotide
  modified_base 34: mod_base = OTHER; note = 2'-O-methyl modified nucleotide
  modified_base 35: mod_base = OTHER; note = 2'-O-methyl modified nucleotide
  modified_base 36: mod_base = OTHER; note = 2'-O-methyl modified nucleotide
  modified_base 37: mod_base = OTHER; note = 2'-O-methyl modified nucleotide
  modified_base 38: mod_base = OTHER; note = 2'-O-methyl modified nucleotide
  modified_base 39: mod_base = OTHER; note = 2'-O-methyl modified nucleotide
  modified_base 40: mod_base = OTHER; note = 2'-O-methyl modified nucleotide
  modified_base 41: mod_base = OTHER; note = 2'-O-methyl modified nucleotide
  modified_base 42: mod_base = OTHER; note = 2'-O-methyl modified nucleotide
  modified_base 43: mod_base = OTHER; note = 2'-O-methyl modified nucleotide
  modified_base 44: mod_base = OTHER; note = 2'-O-methyl modified nucleotide
  modified_base 45: mod_base = OTHER; note = 2'-O-methyl modified nucleotide
  modified_base 46: mod_base = OTHER; note = 2'-O-methyl modified nucleotide
  modified_base 47: mod_base = OTHER; note = 2'-O-methyl modified nucleotide
  modified_base 48: mod_base = OTHER; note = 2'-O-methyl modified nucleotide
  modified_base 49: mod_base = OTHER; note = 2'-O-methyl modified nucleotide
  modified_base 50: mod_base = OTHER; note = 2'-O-methyl modified nucleotide
  modified_base 63: mod_base = OTHER; note = 2'-O-methyl modified nucleotide
  modified_base 64: mod_base = OTHER; note = 2'-O-methyl modified nucleotide
  modified_base 65: mod_base = OTHER; note = 2'-O-methyl modified nucleotide
  modified_base 66: mod_base = OTHER; note = 2'-fluoro modified nucleotide
  modified_base 67: mod_base = OTHER; note = 2'-fluoro modified nucleotide
  modified_base 68: mod_base = OTHER; note = 2'-fluoro modified nucleotide
  modified_base 69: mod_base = OTHER; note = 2'-fluoro modified nucleotide
  modified_base 70: mod_base = OTHER; note = 2'-fluoro modified nucleotide
  modified_base 71: mod_base = OTHER; note = 2'-fluoro modified nucleotide
  modified_base 74: mod_base = OTHER; note = 2'-fluoro modified nucleotide
  modified_base 75: mod_base = OTHER; note = 2'-fluoro modified nucleotide
  modified_base 76: mod_base = OTHER; note = 2'-fluoro modified nucleotide
  modified_base 105: mod_base = OTHER; note = Nucleotide with phosphorothioate linkage
  modified_base 106: mod_base = OTHER; note = 2'-O-methyl modified nucleotide with phosphorothioate linkage
  modified_base 107: mod_base = OTHER; note = 2'-O-methyl modified nucleotide with phosphorothioate linkage
  modified_base 108: mod_base = OTHER; note = 2'-O-methyl modified nucleotide
tgagacatgcttccagtacacgtcgttgtactctgggacttcggtcccagaagctacaacgataaggcttcatgccgaaatcatgagattccaggtgtactggaagca

SEQ ID NO: 29798 - RNA, 108 nt, synthetic construct; identical to SEQ ID NO: 29791
  source 1..108: mol_type = other RNA

SEQ ID NO: 29799 - RNA, 108 nt, synthetic construct; identical to SEQ ID NO: 29792
  source 1..108: mol_type = other RNA

SEQ ID NO: 29800 - RNA, 108 nt, synthetic construct; identical to SEQ ID NO: 29793
  source 1..108: mol_type = other RNA

SEQ ID NO: 29801 - RNA, 108 nt, synthetic construct; identical to SEQ ID NO: 29794
  source 1..108: mol_type = other RNA

SEQ ID NO: 29802 - RNA, 108 nt, synthetic construct; identical to SEQ ID NO: 29795
  source 1..108: mol_type = other RNA

SEQ ID NO: 29803 - RNA, 108 nt, synthetic construct; identical to SEQ ID NO: 29796
  source 1..108: mol_type = other RNA

SEQ ID NO: 29804 - RNA, 108 nt, synthetic construct; identical to SEQ ID NO: 29797
  source 1..108: mol_type = other RNA

SEQ ID NO: 29805 - RNA, 10 nt, synthetic construct
  source 1..10: mol_type = other RNA
gacttcggtc

SEQ ID NO: 29806 - RNA, 10 nt, synthetic construct
  source 1..10: mol_type = other RNA
ctagaaatag

SEQ ID NO: 29807 - RNA, 12 nt, synthetic construct
  source 1..12: mol_type = other RNA
cgcggtaacgcg

SEQ ID NO: 29808 - protein, 4 aa, synthetic construct
YADD

SEQ ID NO: 29809 - protein, 4 aa, synthetic construct
YMDD

SEQ ID NO: 29810 - protein, 4 aa, synthetic construct
YVDD

SEQ ID NO: 29811 - protein, 9 aa, synthetic construct
LAGLIDADG

SEQ ID NO: 29812 - protein, 6 aa, synthetic construct
IENSSP

SEQ ID NO: 29813 - RNA, 60 nt, synthetic construct
  source 1..60: mol_type = other RNA
aaaaaaaaaaaaaaaaaaaaaaaaaaaaaaaaaaaaaaaaaaaaaaaaaaaaaaaaaaaa

SEQ ID NO: 29814 - protein, 4 aa, synthetic construct
SGGS

SEQ ID NO: 29815 - RNA, 5911 nt, synthetic construct
  source 1..5911: mol_type = other RNA
aggaaataagagagaaaagaagagtaagaagaaatataagagccaccatgcctgcggctaagcgggtaaaattggatggtgggagcgacctggtgctgggcctggacatcggcatcggcagcgtgggcgtgggcatcctgaacaaggtgaccggcgagatcatccacaagaacagtcgcatcttccctgctgctcaggctgagaacaacctggtgcgccgcaccaaccgccagggtcgccggcttgctcgccgcaagaagcaccggcgcgtgcgcctgaaccgcctgttcgaggagagcggcctgatcaccgacttcaccaagatcagcatcaacctgaacccctaccagctgcgcgtgaagggcctgaccgacgagctgagcaacgaggagctgttcatcgccctgaagaacatggtgaagcaccgcggcatcagctacctggacgacgccagcgacgacggcaacagcagcgtgggcgactacgcccagatcgtgaaggagaacagcaagcagctggagaccaagacccccggccagatccagctggagcgctaccagacctacggccagctgcgcggcgacttcaccgtggagaaggacggcaagaagcaccgcctgatcaacgtgttccccaccagcgcctaccgcagcgaggccctgcgcatcctgcagacccagcaggagttcaacccccagatcaccgacgagttcatcaaccgctacctggagatcctgaccggcaagcgcaagtactaccacggccccggcaacgagaaaagccgcaccgactacggccgctaccgcaccagcggcgagaccctggacaacatcttcggcatcctgatcggcaagtgcaccttctaccccgacgagttccgcgccgccaaggccagctacaccgcccaggagttcaatctgctgaacgacctgaacaacctgaccgtgcccaccgagaccaagaagctgagcaaggagcagaagaaccagatcatcaactacgtgaagaacgagaaggctatgggccccgccaagctgttcaagtacatcgccaagctgctgagctgcgacgtggccgacatcaagggctaccgcatcgacaagagcggcaaggccgagatccacaccttcgaggcctaccgcaagatgaagaccctggagaccctggacatcgagcagatggaccgagagaccctggacaagctggcctacgtgctgaccctgaacaccgagcgcgagggcatccaggaggccctggagcacgagttcgccgacggcagcttcagccagaaacaggtggacgagctggtgcagttccgcaaggccaacagcagcatcttcggcaagggctggcacaacttcagcgtgaagctgatgatggagctgatccccgagctgtacgagaccagcgaggagcagatgaccatcctgacccgcctgggcaagcagaagaccaccagcagcagcaacaagaccaagtacatcgacgagaagctgctgaccgaggagatctacaaccccgtggtggccaagagcgtgcgccaggccatcaagatcgtgaacgccgccatcaaggagtacggcgacttcgacaacatcgtgatcgagatggcccgcgagaccaacgaggacgacgagaagaaggccatccagaagatccagaaggccaacaaggacgagaaggacgccgccatgctgaaggccgccaaccagtacaacggcaaggccgagctgccccacagcgtgttccacggccacaagcagctggccaccaagatccgcctgtggcaccagcagggcgagcgctgcctgtacaccggcaagaccatcagcatccacgacctgatcaacaacagcaaccagttcgaggtggaccacatcctgcccctgagcatcaccttcgacgacagcctggccaacaaggtgctggtgtacgccaccgccgcccaggagaagggccagcgcaccccctaccaggccctggacagcatggacgacgcctggagcttccgcgagctgaaggccttcgtgcgcgagagcaagaccctgagcaacaagaagaaggagtatctgctgaccgaggaggacatcagcaagttcgacgtgcgcaagaagttcatcgagcgcaacctggtggacacccgctacgccagccgcgtggtgctgaacgccctgcaggagcacttccgcgcccacaagatcgacaccaaggtgagcgtggtgcgcggccagttcaccagccagctgcgccgccactggggcatcgagaagacccgcgacacctaccaccaccacgccgtggacgccctgatcattgcggcttctagccagctgaacctgtggaagaagcagaagaacaccctggtgagctacagcgaggaccagctgctggacatcgagaccggcgagctgatcagcgacgacgagtacaaggagagcgtgttcaaggccccctaccagcacttcgtggacaccctgaaaagcaaggagttcgaggacagcatcctgttcagctaccaggtggacagcaagttcaaccgcaagatcagcgacgccaccatctacgccacccgccaggccaaggtgggcaaggacaaggccgacgagacctacgtgctgggcaagatcaaggacatctacacccaggacggctacgacgccttcatgaagatctacaagaaggacaagagcaagttcctgatgtaccgccacgacccccagaccttcgagaaggtgatcgagcccatcctggagaactaccccaacaagcagatcaacgagaaaggcaaggaggtgccctgcaaccccttcctgaagtacaaggaggagcacggctacatccgcaagtacagcaagaagggcaacggccccgagatcaagagcctgaagtactacgacagcaagctgggcaaccacatcgacatcacccccaaggacagcaacaacaaggtggtgctgcagagcgtgagcccctggcgcgccgacgtgtacttcaacaagaccaccggcaagtacgagatcctggggctgaagtacgccgatctgcagtttgagaaaggcacaggcacctacaagatcagccaggagaagtacaacgacatcaagaagaaggagggcgtggacagcgacagcgagttcaagttcaccctgtacaagaacgaccttctgctggtgaaggacaccgagaccaaggagcaacagctgttccgcttcctgagccgcaccatgcccaagcagaagcactacgtggagctgaagccctacgacaagcagaagttcgagggcggcgaggccctgatcaaggtgctgggcaacgtggccaacagcggccagtgcaagaagggcctgggcaagagcaacatcagcatctacaaggtgcgcaccgacgtgctgggcaaccagcacatcatcaagaacgagggcgacaagcccaagttggacttctctggaggatctagcggaggatcctctggcagcgagacaccaggaacaagcgagtcagcaacaccagagagcagtggcggcagcagcggcggcagcagcaccctaaatatagaagatgagtatcggctacatgagacctcaaaagagccagatgtttctctagggtccacatggctgtctgattttcctcaggcctgggcggaaaccgggggcatgggactggcagttcgccaagctcctctgatcatacctctgaaagcaacctctacccccgtgtccataaaacaataccccatgtcacaagaagccagactggggatcaagccccacatacagagactgttggaccagggaatactggtaccctgccagtccccctggaacacgcccctgctacccgttaagaaaccagggactaatgattataggcctgtccaggatctgagagaagtcaacaagcgggtggaagacatccaccccaccgtgcccaacccttacaacctcttgagcgggctcccaccgtcccaccagtggtacactgtgcttgatttaaaggatgcctttttctgcctgagactccaccccaccagtcagcctctcttcgcctttgagtggagagatccagagatgggaatctcaggacaattgacctggaccagactcccacagggtttcaaaaacagtcccaccctgtttaatgaggcactgcacagagacctagcagacttccggatccagcacccagacttgatcctgctacagtacgtggatgacttactgctggccgccacttctgagctagactgccaacaaggtactcgggccctgttacaaaccctagggaacctcgggtatcgggcctcggccaagaaagcccaaatttgccagaaacaggtcaagtatctggggtatcttctaaaagagggtcagagatggctgactgaggccagaaaagagactgtgatggggcagcctactccgaagacccctcgacaactaagggagttcctagggaaggcaggcttctgtcgcctcttcatccctgggtttgcagaaatggcagcccccctgtaccctctcaccaaaccggggactctgtttaattggggcccagaccaacaaaaggcctatcaagaaatcaagcaagcccttctaactgccccagccctggggttgccagatttgactaagccctttgaactctttgtcgacgagaagcagggctacgccaaaggtgtcctaacgcaaaaactgggaccttggcgtcggccggtggcctacctgtccaaaaagctagacccagtagcagctgggtggcccccttgcctacggatggtagcagccattgccgtactgacaaaggatgcaggcaagctaaccatgggacagccactagtcattctggccccccatgcagtagaggcactagtcaaacaaccccccgaccgctggctttccaacgcccggatgactcactatcaggccttgcttttggacacggaccgggtccagttcggaccggtggtagccctgaacccggctacgctgctcccactgcctgaggaagggctgcaacacaactgccttgatatcctggccgaagcccacggaacccgacccgacctaacggaccagccgctcccagacgccgaccacacctggtacacggatggaagcagtctcttacaagagggacagcgtaaggcgggagctgcggtgaccaccgagaccgaggtaatctgggctaaagccctgccagccgggacatccgctcagcgggctgaactgatagcactcacccaggccctaaagatggcagaaggtaagaagctaaatgtttatactgatagccgttatgcttttgctactgcccatatccatggagaaatatacagaaggcgtgggtggctcacatcagaaggcaaagagatcaaaaataaagacgagatcttggccctactaaaagccctctttctgcccaaaagacttagcataatccattgtccaggacatcaaaagggacacagcgccgaggctagaggcaaccggatggctgaccaagcggcccgaaaggcagccatcacagagactccagacacctctaccctcctcatagaaaattcatcaccctctggcggctcaaaaagaaccgccgacggcagcgaattcgagaaaaggacggcggatggtagcgaattcgagagccctaaaaagaaggccaaggtagagtaatagtgagctggagcctcggtggccatgcttcttgccccttgggcctccccccagcccctcctccccttcctgcacccgtacccccgtggtctttgaataaagtctgaaaaaaaaaaaaaaaattaaaaaaaaaaaaaaaaaaaaaaaaatttaaaaaaaaaaaaaaaaaaaaaaaaaaaaaaaaaatttttaaaaaaaaaaaaaaaaaaaaaaaaaaaaaaaaaaaaaaaaaaaaa

SEQ ID NO: 29816 - RNA, 54 nt, synthetic construct; identical to SEQ ID NO: 26000
  source 1..54: mol_type = other RNA
  modified_base 9: mod_base = OTHER; note = 2'-O-methyl modified nucleotide
  modified_base 10: mod_base = OTHER; note = 2'-O-methyl modified nucleotide
  modified_base 11: mod_base = OTHER; note = 2'-O-methyl modified nucleotide
  modified_base 12: mod_base = OTHER; note = 2'-O-methyl modified nucleotide
  modified_base 13: mod_base = OTHER; note = 2'-O-methyl modified nucleotide
  modified_base 14: mod_base = OTHER; note = 2'-O-methyl modified nucleotide
  modified_base 15: mod_base = OTHER; note = 2'-O-methyl modified nucleotide
  modified_base 16: mod_base = OTHER; note = 2'-O-methyl modified nucleotide
  modified_base 17: mod_base = OTHER; note = 2'-O-methyl modified nucleotide
  modified_base 18: mod_base = OTHER; note = 2'-O-methyl modified nucleotide
  modified_base 19: mod_base = OTHER; note = 2'-O-methyl modified nucleotide
  modified_base 20: mod_base = OTHER; note = 2'-O-methyl modified nucleotide
  modified_base 21: mod_base = OTHER; note = 2'-O-methyl modified nucleotide
  modified_base 22: mod_base = OTHER; note = 2'-O-methyl modified nucleotide
  modified_base 23: mod_base = OTHER; note = 2'-O-methyl modified nucleotide
  modified_base 24: mod_base = OTHER; note = 2'-O-methyl modified nucleotide
  modified_base 25: mod_base = OTHER; note = 2'-O-methyl modified nucleotide
  modified_base 51: mod_base = OTHER; note = 2'-O-methyl modified nucleotide
  modified_base 52: mod_base = OTHER; note = 2'-O-methyl modified nucleotide
  modified_base 53: mod_base = OTHER; note = 2'-O-methyl modified nucleotide
  modified_base 54: mod_base = OTHER; note = 2'-O-methyl modified nucleotide

SEQ ID NO: 29817 - RNA, 54 nt, synthetic construct; identical to SEQ ID NO: 26000
  source 1..54: mol_type = other RNA
  modified_base 10: mod_base = OTHER; note = 2'-O-methyl modified nucleotide
  modified_base 11: mod_base = OTHER; note = 2'-O-methyl modified nucleotide
  modified_base 12: mod_base = OTHER; note = 2'-O-methyl modified nucleotide
  modified_base 13: mod_base = OTHER; note = 2'-O-methyl modified nucleotide
  modified_base 14: mod_base = OTHER; note = 2'-O-methyl modified nucleotide
  modified_base 15: mod_base = OTHER; note = 2'-O-methyl modified nucleotide
  modified_base 16: mod_base = OTHER; note = 2'-O-methyl modified nucleotide
  modified_base 17: mod_base = OTHER; note = 2'-O-methyl modified nucleotide
  modified_base 18: mod_base = OTHER; note = 2'-O-methyl modified nucleotide
  modified_base 19: mod_base = OTHER; note = 2'-O-methyl modified nucleotide
  modified_base 20: mod_base = OTHER; note = 2'-O-methyl modified nucleotide
  modified_base 21: mod_base = OTHER; note = 2'-O-methyl modified nucleotide
  modified_base 22: mod_base = OTHER; note = 2'-O-methyl modified nucleotide
  modified_base 23: mod_base = OTHER; note = 2'-O-methyl modified nucleotide
  modified_base 24: mod_base = OTHER; note = 2'-O-methyl modified nucleotide
  modified_base 25: mod_base = OTHER; note = 2'-O-methyl modified nucleotide

SEQ ID NO: 29818 - RNA, 54 nt, synthetic construct; identical to SEQ ID NO: 26000
  source 1..54: mol_type = other RNA
  modified_base 12: mod_base = OTHER; note = 2'-O-methyl modified nucleotide
  modified_base 13: mod_base = OTHER; note = 2'-O-methyl modified nucleotide
  modified_base 14: mod_base = OTHER; note = 2'-O-methyl modified nucleotide
  modified_base 15: mod_base = OTHER; note = 2'-O-methyl modified nucleotide
  modified_base 16: mod_base = OTHER; note = 2'-O-methyl modified nucleotide
  modified_base 17: mod_base = OTHER; note = 2'-O-methyl modified nucleotide
  modified_base 18: mod_base = OTHER; note = 2'-O-methyl modified nucleotide
  modified_base 19: mod_base = OTHER; note = 2'-O-methyl modified nucleotide
  modified_base 20: mod_base = OTHER; note = 2'-O-methyl modified nucleotide
  modified_base 21: mod_base = OTHER; note = 2'-O-methyl modified nucleotide

SEQ ID NO: 29819 - RNA, 54 nt, synthetic construct; identical to SEQ ID NO: 26000
  source 1..54: mol_type = other RNA
  modified_base 10: mod_base = OTHER; note = 2'-O-methyl modified nucleotide
  modified_base 11: mod_base = OTHER; note = 2'-O-methyl modified nucleotide
  modified_base 12: mod_base = OTHER; note = 2'-O-methyl modified nucleotide
  modified_base 13: mod_base = OTHER; note = 2'-O-methyl modified nucleotide
  modified_base 14: mod_base = OTHER; note = 2'-O-methyl modified nucleotide
  modified_base 15: mod_base = OTHER; note = 2'-O-methyl modified nucleotide
  modified_base 16: mod_base = OTHER; note = 2'-O-methyl modified nucleotide
  modified_base 17: mod_base = OTHER; note = 2'-O-methyl modified nucleotide
  modified_base 18: mod_base = OTHER; note = 2'-O-methyl modified nucleotide
  modified_base 19: mod_base = OTHER; note = 2'-O-methyl modified nucleotide
  modified_base 20: mod_base = OTHER; note = 2'-O-methyl modified nucleotide
  modified_base 21: mod_base = OTHER; note = 2'-O-methyl modified nucleotide
  modified_base 22: mod_base = OTHER; note = 2'-O-methyl modified nucleotide
  modified_base 23: mod_base = OTHER; note = 2'-O-methyl modified nucleotide
  modified_base 24: mod_base = OTHER; note = 2'-O-methyl modified nucleotide
  modified_base 25: mod_base = OTHER; note = 2'-O-methyl modified nucleotide
  modified_base 50: mod_base = OTHER; note = 2'-O-methyl modified nucleotide
  modified_base 51: mod_base = OTHER; note = 2'-O-methyl modified nucleotide
  modified_base 52: mod_base = OTHER; note = 2'-O-methyl modified nucleotide
  modified_base 53: mod_base = OTHER; note = 2'-O-methyl modified nucleotide
  modified_base 54: mod_base = OTHER; note = 2'-O-methyl modified nucleotide

SEQ ID NO: 29820 - RNA, 54 nt, synthetic construct; identical to SEQ ID NO: 26000
  source 1..54: mol_type = other RNA
  modified_base 12: mod_base = OTHER; note = 2'-O-methyl modified nucleotide
  modified_base 13: mod_base = OTHER; note = 2'-O-methyl modified nucleotide
  modified_base 14: mod_base = OTHER; note = 2'-O-methyl modified nucleotide
  modified_base 15: mod_base = OTHER; note = 2'-O-methyl modified nucleotide
  modified_base 16: mod_base = OTHER; note = 2'-O-methyl modified nucleotide
  modified_base 17: mod_base = OTHER; note = 2'-O-methyl modified nucleotide
  modified_base 18: mod_base = OTHER; note = 2'-O-methyl modified nucleotide
  modified_base 19: mod_base = OTHER; note = 2'-O-methyl modified nucleotide
  modified_base 20: mod_base = OTHER; note = 2'-O-methyl modified nucleotide
  modified_base 21: mod_base = OTHER; note = 2'-O-methyl modified nucleotide
  modified_base 53: mod_base = OTHER; note = 2'-O-methyl modified nucleotide

SEQ ID NO: 29821 - RNA, 54 nt, synthetic construct; identical to SEQ ID NO: 26000
  source 1..54: mol_type = other RNA
  modified_base 12: mod_base = OTHER; note = 2'-O-methyl modified nucleotide
  modified_base 13: mod_base = OTHER; note = 2'-O-methyl modified nucleotide
  modified_base 14: mod_base = OTHER; note = 2'-O-methyl modified nucleotide
  modified_base 15: mod_base = OTHER; note = 2'-O-methyl modified nucleotide
  modified_base 16: mod_base = OTHER; note = 2'-O-methyl modified nucleotide
  modified_base 17: mod_base = OTHER; note = 2'-O-methyl modified nucleotide
  modified_base 18: mod_base = OTHER; note = 2'-O-methyl modified nucleotide
  modified_base 19: mod_base = OTHER; note = 2'-O-methyl modified nucleotide
  modified_base 20: mod_base = OTHER; note = 2'-O-methyl modified nucleotide
  modified_base 21: mod_base = OTHER; note = 2'-O-methyl modified nucleotide
  modified_base 52: mod_base = OTHER; note = 2'-O-methyl modified nucleotide

SEQ ID NO: 29822 - RNA, 54 nt, synthetic construct; identical to SEQ ID NO: 26000
  source 1..54: mol_type = other RNA
  modified_base 4: mod_base = OTHER; note = 2'-O-methyl modified nucleotide
  modified_base 5: mod_base = OTHER; note = 2'-O-methyl modified nucleotide
  modified_base 6: mod_base = OTHER; note = 2'-O-methyl modified nucleotide
  modified_base 13: mod_base = OTHER; note = 2'-O-methyl modified nucleotide
  modified_base 14: mod_base = OTHER; note = 2'-O-methyl modified nucleotide
  modified_base 15: mod_base = OTHER; note = 2'-O-methyl modified nucleotide
  modified_base 16: mod_base = OTHER; note = 2'-O-methyl modified nucleotide
  modified_base 17: mod_base = OTHER; note = 2'-O-methyl modified nucleotide
  modified_base 18: mod_base = OTHER; note = 2'-O-methyl modified nucleotide
  modified_base 19: mod_base = OTHER; note = 2'-O-methyl modified nucleotide
  modified_base 20: mod_base = OTHER; note = 2'-O-methyl modified nucleotide
  modified_base 21: mod_base = OTHER; note = 2'-O-methyl modified nucleotide
  modified_base 22: mod_base = OTHER; note = 2'-O-methyl modified nucleotide
  modified_base 23: mod_base = OTHER; note = 2'-O-methyl modified nucleotide
  modified_base 24: mod_base = OTHER; note = 2'-O-methyl modified nucleotide
  modified_base 34: mod_base = OTHER; note = 2'-O-methyl modified nucleotide
  modified_base 35: mod_base = OTHER; note = 2'-O-methyl modified nucleotide
  modified_base 36: mod_base = OTHER; note = 2'-O-methyl modified nucleotide
  modified_base 37: mod_base = OTHER; note = 2'-O-methyl modified nucleotide
  modified_base 38: mod_base = OTHER; note = 2'-O-methyl modified nucleotide
  modified_base 39: mod_base = OTHER; note = 2'-O-methyl modified nucleotide
  modified_base 40: mod_base = OTHER; note = 2'-O-methyl modified nucleotide
  modified_base 41: mod_base = OTHER; note = 2'-O-methyl modified nucleotide
  modified_base 42: mod_base = OTHER; note = 2'-O-methyl modified nucleotide

SEQ ID NO: 29823 - RNA, 54 nt, synthetic construct; identical to SEQ ID NO: 26000
  source 1..54: mol_type = other RNA
  modified_base 12: mod_base = OTHER; note = 2'-O-methyl modified nucleotide
  modified_base 13: mod_base = OTHER; note = 2'-O-methyl modified nucleotide
  modified_base 14: mod_base = OTHER; note = 2'-O-methyl modified nucleotide
  modified_base 15: mod_base = OTHER; note = 2'-O-methyl modified nucleotide
  modified_base 16: mod_base = OTHER; note = 2'-O-methyl modified nucleotide
  modified_base 17: mod_base = OTHER; note = 2'-O-methyl modified nucleotide
  modified_base 18: mod_base = OTHER; note = 2'-O-methyl modified nucleotide
  modified_base 19: mod_base = OTHER; note = 2'-O-methyl modified nucleotide
  modified_base 20: mod_base = OTHER; note = 2'-O-methyl modified nucleotide
  modified_base 21: mod_base = OTHER; note = 2'-O-methyl modified nucleotide
  modified_base 53: mod_base = OTHER; note = 2'-O-methyl modified nucleotide
  modified_base 54: mod_base = OTHER; note = 2'-O-methyl modified nucleotide

SEQ ID NO: 29824 - RNA, 54 nt, synthetic construct; identical to SEQ ID NO: 26000
  source 1..54: mol_type = other RNA
  modified_base 12: mod_base = OTHER; note = 2'-O-methyl modified nucleotide
  modified_base 13: mod_base = OTHER; note = 2'-O-methyl modified nucleotide
  modified_base 14: mod_base = OTHER; note = 2'-O-methyl modified nucleotide
  modified_base 15: mod_base = OTHER; note = 2'-O-methyl modified nucleotide
  modified_base 16: mod_base = OTHER; note = 2'-O-methyl modified nucleotide
  modified_base 17: mod_base = OTHER; note = 2'-O-methyl modified nucleotide
  modified_base 18: mod_base = OTHER; note = 2'-O-methyl modified nucleotide
  modified_base 19: mod_base = OTHER; note = 2'-O-methyl modified nucleotide
  modified_base 20: mod_base = OTHER; note = 2'-O-methyl modified nucleotide
  modified_base 21: mod_base = OTHER; note = 2'-O-methyl modified nucleotide
  modified_base 54: mod_base = OTHER; note = 2'-O-methyl modified nucleotide

SEQ ID NO: 29825 - RNA, 54 nt, synthetic construct; identical to SEQ ID NO: 26000
  source 1..54: mol_type = other RNA
  modified_base 4: mod_base = OTHER; note = 2'-O-methyl modified nucleotide
  modified_base 6: mod_base = OTHER; note = 2'-O-methyl modified nucleotide
  modified_base 8: mod_base = OTHER; note = 2'-O-methyl modified nucleotide
  modified_base 10: mod_base = OTHER; note = 2'-O-methyl modified nucleotide
  modified_base 12: mod_base = OTHER; note = 2'-O-methyl modified nucleotide
  modified_base 13: mod_base = OTHER; note = 2'-O-methyl modified nucleotide
  modified_base 14: mod_base = OTHER; note = 2'-O-methyl modified nucleotide
  modified_base 15: mod_base = OTHER; note = 2'-O-methyl modified nucleotide
  modified_base 16: mod_base = OTHER; note = 2'-O-methyl modified nucleotide
  modified_base 17: mod_base = OTHER; note = 2'-O-methyl modified nucleotide
  modified_base 18: mod_base = OTHER; note = 2'-O-methyl modified nucleotide
  modified_base 19: mod_base = OTHER; note = 2'-O-methyl modified nucleotide
  modified_base 20: mod_base = OTHER; note = 2'-O-methyl modified nucleotide
  modified_base 21: mod_base = OTHER; note = 2'-O-methyl modified nucleotide
  modified_base 22: mod_base = OTHER; note = 2'-O-methyl modified nucleotide
  modified_base 24: mod_base = OTHER; note = 2'-O-methyl modified nucleotide
  modified_base 26: mod_base = OTHER; note = 2'-O-methyl modified nucleotide
  modified_base 28: mod_base = OTHER; note = 2'-O-methyl modified nucleotide
  modified_base 30: mod_base = OTHER; note = 2'-O-methyl modified nucleotide
  modified_base 32: mod_base = OTHER; note = 2'-O-methyl modified nucleotide
  modified_base 34: mod_base = OTHER; note = 2'-O-methyl modified nucleotide
  modified_base 36: mod_base = OTHER; note = 2'-O-methyl modified nucleotide
  modified_base 38: mod_base = OTHER; note = 2'-O-methyl modified nucleotide
  modified_base 40: mod_base = OTHER; note = 2'-O-methyl modified nucleotide
  modified_base 42: mod_base = OTHER; note = 2'-O-methyl modified nucleotide

SEQ ID NO: 29826 - RNA, 54 nt, synthetic construct; identical to SEQ ID NO: 26000
  source 1..54: mol_type = other RNA
  modified_base 5: mod_base = OTHER; note = 2'-O-methyl modified nucleotide
  modified_base 7: mod_base = OTHER; note = 2'-O-methyl modified nucleotide
  modified_base 9: mod_base = OTHER; note = 2'-O-methyl modified nucleotide
  modified_base 11: mod_base = OTHER; note = 2'-O-methyl modified nucleotide
  modified_base 12: mod_base = OTHER; note = 2'-O-methyl modified nucleotide
  modified_base 13: mod_base = OTHER; note = 2'-O-methyl modified nucleotide
  modified_base 14: mod_base = OTHER; note = 2'-O-methyl modified nucleotide
  modified_base 15: mod_base = OTHER; note = 2'-O-methyl modified nucleotide
  modified_base 16: mod_base = OTHER; note = 2'-O-methyl modified nucleotide
  modified_base 17: mod_base = OTHER; note = 2'-O-methyl modified nucleotide
  modified_base 18: mod_base = OTHER; note = 2'-O-methyl modified nucleotide
  modified_base 19: mod_base = OTHER; note = 2'-O-methyl modified nucleotide
  modified_base 20: mod_base = OTHER; note = 2'-O-methyl modified nucleotide
  modified_base 21: mod_base = OTHER; note = 2'-O-methyl modified nucleotide
  modified_base 23: mod_base = OTHER; note = 2'-O-methyl modified nucleotide
  modified_base 25: mod_base = OTHER; note = 2'-O-methyl modified nucleotide
  modified_base 27: mod_base = OTHER; note = 2'-O-methyl modified nucleotide
  modified_base 29: mod_base = OTHER; note = 2'-O-methyl modified nucleotide
  modified_base 31: mod_base = OTHER; note = 2'-O-methyl modified nucleotide
  modified_base 33: mod_base = OTHER; note = 2'-O-methyl modified nucleotide
  modified_base 35: mod_base = OTHER; note = 2'-O-methyl modified nucleotide
  modified_base 37: mod_base = OTHER; note = 2'-O-methyl modified nucleotide
  modified_base 39: mod_base = OTHER; note = 2'-O-methyl modified nucleotide
  modified_base 41: mod_base = OTHER; note = 2'-O-methyl modified nucleotide

SEQ ID NO: 29827 - RNA, 54 nt, synthetic construct; identical to SEQ ID NO: 26000
  source 1..54: mol_type = other RNA
  modified_base 12: mod_base = OTHER; note = 2'-O-methyl modified nucleotide
  modified_base 13: mod_base = OTHER; note = 2'-O-methyl modified nucleotide
  modified_base 14: mod_base = OTHER; note = 2'-O-methyl modified nucleotide
  modified_base 15: mod_base = OTHER; note = 2'-O-methyl modified nucleotide
  modified_base 16: mod_base = OTHER; note = 2'-O-methyl modified nucleotide
  modified_base 17: mod_base = OTHER; note = 2'-O-methyl modified nucleotide
  modified_base 18: mod_base = OTHER; note = 2'-O-methyl modified nucleotide
  modified_base 19: mod_base = OTHER; note = 2'-O-methyl modified nucleotide
  modified_base 20: mod_base = OTHER; note = 2'-O-methyl modified nucleotide
  modified_base 21: mod_base = OTHER; note = 2'-O-methyl modified nucleotide
  modified_base 25: mod_base = OTHER; note = 2'-O-methyl modified nucleotide
  modified_base 26: mod_base = OTHER; note = 2'-O-methyl modified nucleotide
  modified_base 27: mod_base = OTHER; note = 2'-O-methyl modified nucleotide
  modified_base 28: mod_base = OTHER; note = 2'-O-methyl modified nucleotide
  modified_base 29: mod_base = OTHER; note = 2'-O-methyl modified nucleotide
  modified_base 30: mod_base = OTHER; note = 2'-O-methyl modified nucleotide
  modified_base 31: mod_base = OTHER; note = 2'-O-methyl modified nucleotide
  modified_base 32: mod_base = OTHER; note = 2'-O-methyl modified nucleotide
  modified_base 33: mod_base = OTHER; note = 2'-O-methyl modified nucleotide

SEQ ID NO: 29828 - RNA, 54 nt, synthetic construct; identical to SEQ ID NO: 26000
  source 1..54: mol_type = other RNA
  modified_base 5: mod_base = OTHER; note = 2'-O-methyl modified nucleotide
  modified_base 7: mod_base = OTHER; note = 2'-O-methyl modified nucleotide
  modified_base 9: mod_base = OTHER; note = 2'-O-methyl modified nucleotide
  modified_base 11: mod_base = OTHER; note = 2'-O-methyl modified nucleotide
  modified_base 12: mod_base = OTHER; note = 2'-O-methyl modified nucleotide
  modified_base 13: mod_base = OTHER; note = 2'-O-methyl modified nucleotide
  modified_base 14: mod_base = OTHER; note = 2'-O-methyl modified nucleotide
  modified_base 15: mod_base = OTHER; note = 2'-O-methyl modified nucleotide
  modified_base 16: mod_base = OTHER; note = 2'-O-methyl modified nucleotide
  modified_base 17: mod_base = OTHER; note = 2'-O-methyl modified nucleotide
  modified_base 18: mod_base = OTHER; note = 2'-O-methyl modified nucleotide
  modified_base 19: mod_base = OTHER; note = 2'-O-methyl modified nucleotide
  modified_base 20: mod_base = OTHER; note = 2'-O-methyl modified nucleotide
  modified_base 21: mod_base = OTHER; note = 2'-O-methyl modified nucleotide
  modified_base 22: mod_base = OTHER; note = 2'-O-methyl modified nucleotide
  modified_base 24: mod_base = OTHER; note = 2'-O-methyl modified nucleotide
  modified_base 26: mod_base = OTHER; note = 2'-O-methyl modified nucleotide
  modified_base 28: mod_base = OTHER; note = 2'-O-methyl modified nucleotide
  modified_base 30: mod_base = OTHER; note = 2'-O-methyl modified nucleotide
  modified_base 32: mod_base = OTHER; note = 2'-O-methyl modified nucleotide
  modified_base 34: mod_base = OTHER; note = 2'-O-methyl modified nucleotide
  modified_base 36: mod_base = OTHER; note = 2'-O-methyl modified nucleotide
  modified_base 38: mod_base = OTHER; note = 2'-O-methyl modified nucleotide
  modified_base 40: mod_base = OTHER; note = 2'-O-methyl modified nucleotide
  modified_base 42: mod_base = OTHER; note = 2'-O-methyl modified nucleotide

SEQ ID NO: 29829 - RNA, 54 nt, synthetic construct; identical to SEQ ID NO: 26000
  source 1..54: mol_type = other RNA
  modified_base 12: mod_base = OTHER; note = 2'-O-methyl modified nucleotide
  modified_base 13: mod_base = OTHER; note = 2'-O-methyl modified nucleotide
  modified_base 14: mod_base = OTHER; note = 2'-O-methyl modified nucleotide
  modified_base 15: mod_base = OTHER; note = 2'-O-methyl modified nucleotide
  modified_base 16: mod_base = OTHER; note = 2'-O-methyl modified nucleotide
  modified_base 17: mod_base = OTHER; note = 2'-O-methyl modified nucleotide
  modified_base 18: mod_base = OTHER; note = 2'-O-methyl modified nucleotide
  modified_base 19: mod_base = OTHER; note = 2'-O-methyl modified nucleotide
  modified_base 20: mod_base = OTHER; note = 2'-O-methyl modified nucleotide
  modified_base 21: mod_base = OTHER; note = 2'-O-methyl modified nucleotide
  modified_base 34: mod_base = OTHER; note = 2'-O-methyl modified nucleotide
  modified_base 35: mod_base = OTHER; note = 2'-O-methyl modified nucleotide
  modified_base 36: mod_base = OTHER; note = 2'-O-methyl modified nucleotide
  modified_base 37: mod_base = OTHER; note = 2'-O-methyl modified nucleotide
  modified_base 38: mod_base = OTHER; note = 2'-O-methyl modified nucleotide
  modified_base 39: mod_base = OTHER; note = 2'-O-methyl modified nucleotide
  modified_base 40: mod_base = OTHER; note = 2'-O-methyl modified nucleotide
  modified_base 41: mod_base = OTHER; note = 2'-O-methyl modified nucleotide
  modified_base 42: mod_base = OTHER; note = 2'-O-methyl modified nucleotide

SEQ ID NO: 29830 - RNA, 54 nt, synthetic construct; identical to SEQ ID NO: 26000
  source 1..54: mol_type = other RNA
  modified_base 4: mod_base = OTHER; note = 2'-O-methyl modified nucleotide
  modified_base 5: mod_base = OTHER; note = 2'-O-methyl modified nucleotide
  modified_base 6: mod_base = OTHER; note = 2'-O-methyl modified nucleotide
  modified_base 12: mod_base = OTHER; note = 2'-O-methyl modified nucleotide
  modified_base 13: mod_base = OTHER; note = 2'-O-methyl modified nucleotide
  modified_base 14: mod_base = OTHER; note = 2'-O-methyl modified nucleotide
  modified_base 15: mod_base = OTHER; note = 2'-O-methyl modified nucleotide
  modified_base 16: mod_base = OTHER; note = 2'-O-methyl modified nucleotide
  modified_base 17: mod_base = OTHER; note = 2'-O-methyl modified nucleotide
  modified_base 18: mod_base = OTHER; note = 2'-O-methyl modified nucleotide
  modified_base 19: mod_base = OTHER; note = 2'-O-methyl modified nucleotide
  modified_base 20: mod_base = OTHER; note = 2'-O-methyl modified nucleotide
  modified_base 21: mod_base = OTHER; note = 2'-O-methyl modified nucleotide

SEQ ID NO: 29831 - RNA, 54 nt, synthetic construct; identical to SEQ ID NO: 26000
  source 1..54: mol_type = other RNA
  modified_base 4: mod_base = OTHER; note = 2'-O-methyl modified nucleotide
  modified_base 5: mod_base = OTHER; note = 2'-O-methyl modified nucleotide
  modified_base 6: mod_base = OTHER; note = 2'-O-methyl modified nucleotide
  modified_base 7: mod_base = OTHER; note = 2'-O-methyl modified nucleotide
  modified_base 8: mod_base = OTHER; note = 2'-O-methyl modified nucleotide
  modified_base 9: mod_base = OTHER; note = 2'-O-methyl modified nucleotide
  modified_base 10: mod_base = OTHER; note = 2'-O-methyl modified nucleotide
  modified_base 11: mod_base = OTHER; note = 2'-O-methyl modified nucleotide
  modified_base 12: mod_base = OTHER; note = 2'-O-methyl modified nucleotide
  modified_base 13: mod_base = OTHER; note = 2'-O-methyl modified nucleotide
  modified_base 14: mod_base = OTHER; note = 2'-O-methyl modified nucleotide
  modified_base 15: mod_base = OTHER; note = 2'-O-methyl modified nucleotide
  modified_base 16: mod_base = OTHER; note = 2'-O-methyl modified nucleotide
  modified_base 17: mod_base = OTHER; note = 2'-O-methyl modified nucleotide
  modified_base 18: mod_base = OTHER; note = 2'-O-methyl modified nucleotide
  modified_base 19: mod_base = OTHER; note = 2'-O-methyl modified nucleotide
  modified_base 20: mod_base = OTHER; note = 2'-O-methyl modified nucleotide
  modified_base 21: mod_base = OTHER; note = 2'-O-methyl modified nucleotide
  modified_base 22: mod_base = OTHER; note = 2'-O-methyl modified nucleotide
  modified_base 23: mod_base = OTHER; note = 2'-O-methyl modified nucleotide
  modified_base 24: mod_base = OTHER; note = 2'-O-methyl modified nucleotide

SEQ ID NO: 29832 - RNA, 54 nt, synthetic construct; identical to SEQ ID NO: 26000
  source 1..54: mol_type = other RNA
  modified_base 7: mod_base = OTHER; note = 2'-O-methyl modified nucleotide
  modified_base 8: mod_base = OTHER; note = 2'-O-methyl modified nucleotide
  modified_base 9: mod_base = OTHER; note = 2'-O-methyl modified nucleotide
  modified_base 10: mod_base = OTHER; note = 2'-O-methyl modified nucleotide
  modified_base 11: mod_base = OTHER; note = 2'-O-methyl modified nucleotide
  modified_base 12: mod_base = OTHER; note = 2'-O-methyl modified nucleotide
  modified_base 13: mod_base = OTHER; note = 2'-O-methyl modified nucleotide
  modified_base 14: mod_base = OTHER; note = 2'-O-methyl modified nucleotide
  modified_base 15: mod_base = OTHER; note = 2'-O-methyl modified nucleotide
  modified_base 16: mod_base = OTHER; note = 2'-O-methyl modified nucleotide
  modified_base 17: mod_base = OTHER; note = 2'-O-methyl modified nucleotide
  modified_base 18: mod_base = OTHER; note = 2'-O-methyl modified nucleotide
  modified_base 19: mod_base = OTHER; note = 2'-O-methyl modified nucleotide
  modified_base 20: mod_base = OTHER; note = 2'-O-methyl modified nucleotide
  modified_base 21: mod_base = OTHER; note = 2'-O-methyl modified nucleotide
  modified_base 22: mod_base = OTHER; note = 2'-O-methyl modified nucleotide
  modified_base 23: mod_base = OTHER; note = 2'-O-methyl modified nucleotide
  modified_base 24: mod_base = OTHER; note = 2'-O-methyl modified nucleotide

SEQ ID NO: 29833 - RNA, 54 nt, synthetic construct; identical to SEQ ID NO: 26000
  source 1..54: mol_type = other RNA
  modified_base 4: mod_base = OTHER; note = 2'-O-methyl modified nucleotide
  modified_base 5: mod_base = OTHER; note = 2'-O-methyl modified nucleotide
  modified_base 6: mod_base = OTHER; note = 2'-O-methyl modified nucleotide
  modified_base 12: mod_base = OTHER; note = 2'-O-methyl modified nucleotide
  modified_base 13: mod_base = OTHER; note = 2'-O-methyl modified nucleotide
  modified_base 14: mod_base = OTHER; note = 2'-O-methyl modified nucleotide
  modified_base 15: mod_base = OTHER; note = 2'-O-methyl modified nucleotide
  modified_base 16: mod_base = OTHER; note = 2'-O-methyl modified nucleotide
  modified_base 17: mod_base = OTHER; note = 2'-O-methyl modified nucleotide
  modified_base 18: mod_base = OTHER; note = 2'-O-methyl modified nucleotide
  modified_base 19: mod_base = OTHER; note = 2'-O-methyl modified nucleotide
  modified_base 20: mod_base = OTHER; note = 2'-O-methyl modified nucleotide
  modified_base 21: mod_base = OTHER; note = 2'-O-methyl modified nucleotide
  modified_base 34: mod_base = OTHER; note = 2'-O-methyl modified nucleotide
  modified_base 35: mod_base = OTHER; note = 2'-O-methyl modified nucleotide
  modified_base 36: mod_base = OTHER; note = 2'-O-methyl modified nucleotide
  modified_base 37: mod_base = OTHER; note = 2'-O-methyl modified nucleotide
  modified_base 38: mod_base = OTHER; note = 2'-O-methyl modified nucleotide
  modified_base 39: mod_base = OTHER; note = 2'-O-methyl modified nucleotide
  modified_base 40: mod_base = OTHER; note = 2'-O-methyl modified nucleotide
  modified_base 41: mod_base = OTHER; note = 2'-O-methyl modified nucleotide
  modified_base 42: mod_base = OTHER; note = 2'-O-methyl modified nucleotide

SEQ ID NO: 29834 - RNA, 54 nt, synthetic construct; identical to SEQ ID NO: 26000
  source 1..54: mol_type = other RNA
  modified_base 4: mod_base = OTHER; note = 2'-O-methyl modified nucleotide
  modified_base 5: mod_base = OTHER; note = 2'-O-methyl modified nucleotide
  modified_base 6: mod_base = OTHER; note = 2'-O-methyl modified nucleotide
  modified_base 7: mod_base = OTHER; note = 2'-O-methyl modified nucleotide
  modified_base 8: mod_base = OTHER; note = 2'-O-methyl modified nucleotide
  modified_base 9: mod_base = OTHER; note = 2'-O-methyl modified nucleotide
  modified_base 10: mod_base = OTHER; note = 2'-O-methyl modified nucleotide
  modified_base 11: mod_base = OTHER; note = 2'-O-methyl modified nucleotide
  modified_base 12: mod_base = OTHER; note = 2'-O-methyl modified nucleotide
  modified_base 13: mod_base = OTHER; note = 2'-O-methyl modified nucleotide
  modified_base 14: mod_base = OTHER; note = 2'-O-methyl modified nucleotide
  modified_base 15: mod_base = OTHER; note = 2'-O-methyl modified nucleotide
  modified_base 16: mod_base = OTHER; note = 2'-O-methyl modified nucleotide
  modified_base 17: mod_base = OTHER; note = 2'-O-methyl modified nucleotide
  modified_base 18: mod_base = OTHER; note = 2'-O-methyl modified nucleotide
  modified_base 19: mod_base = OTHER; note = 2'-O-methyl modified nucleotide
  modified_base 20: mod_base = OTHER; note = 2'-O-methyl modified nucleotide
  modified_base 21: mod_base = OTHER; note = 2'-O-methyl modified nucleotide
  modified_base 22: mod_base = OTHER; note = 2'-O-methyl modified nucleotide
  modified_base 23: mod_base = OTHER; note = 2'-O-methyl modified nucleotide
  modified_base 24: mod_base = OTHER; note = 2'-O-methyl modified nucleotide
  modified_base 34: mod_base = OTHER; note = 2'-O-methyl modified nucleotide
  modified_base 35: mod_base = OTHER; note = 2'-O-methyl modified nucleotide
  modified_base 36: mod_base = OTHER; note = 2'-O-methyl modified nucleotide
  modified_base 37: mod_base = OTHER; note = 2'-O-methyl modified nucleotide
  modified_base 38: mod_base = OTHER; note = 2'-O-methyl modified nucleotide
  modified_base 39: mod_base = OTHER; note = 2'-O-methyl modified nucleotide
  modified_base 40: mod_base = OTHER; note = 2'-O-methyl modified nucleotide
  modified_base 41: mod_base = OTHER; note = 2'-O-methyl modified nucleotide
  modified_base 42: mod_base = OTHER; note = 2'-O-methyl modified nucleotide

SEQ ID NO: 29835 - RNA, 54 nt, synthetic construct; identical to SEQ ID NO: 26000
  source 1..54: mol_type = other RNA
  modified_base 12: mod_base = OTHER; note = 2'-O-methyl modified nucleotide
  modified_base 13: mod_base = OTHER; note = 2'-O-methyl modified nucleotide
  modified_base 14: mod_base = OTHER; note = 2'-O-methyl modified nucleotide
  modified_base 15: mod_base = OTHER; note = 2'-O-methyl modified nucleotide
  modified_base 16: mod_base = OTHER; note = 2'-O-methyl modified nucleotide
  modified_base 17: mod_base = OTHER; note = 2'-O-methyl modified nucleotide
  modified_base 18: mod_base = OTHER; note = 2'-O-methyl modified nucleotide
  modified_base 19: mod_base = OTHER; note = 2'-O-methyl modified nucleotide
  modified_base 20: mod_base = OTHER; note = 2'-O-methyl modified nucleotide
  modified_base 21: mod_base = OTHER; note = 2'-O-methyl modified nucleotide
  modified_base 45: mod_base = OTHER; note = 2'-O-methyl modified nucleotide

SEQ ID NO: 29836 - RNA, 54 nt, synthetic construct; identical to SEQ ID NO: 26000
  source 1..54: mol_type = other RNA
  modified_base 12: mod_base = OTHER; note = 2'-O-methyl modified nucleotide
  modified_base 13: mod_base = OTHER; note = 2'-O-methyl modified nucleotide
  modified_base 14: mod_base = OTHER; note = 2'-O-methyl modified nucleotide
  modified_base 15: mod_base = OTHER; note = 2'-O-methyl modified nucleotide
  modified_base 16: mod_base = OTHER; note = 2'-O-methyl modified nucleotide
  modified_base 17: mod_base = OTHER; note = 2'-O-methyl modified nucleotide
  modified_base 18: mod_base = OTHER; note = 2'-O-methyl modified nucleotide
  modified_base 19: mod_base = OTHER; note = 2'-O-methyl modified nucleotide
  modified_base 20: mod_base = OTHER; note = 2'-O-methyl modified nucleotide
  modified_base 21: mod_base = OTHER; note = 2'-O-methyl modified nucleotide
  modified_base 43: mod_base = OTHER; note = 2'-O-methyl modified nucleotide
  modified_base 44: mod_base = OTHER; note = 2'-O-methyl modified nucleotide

SEQ ID NO: 29837 - RNA, 54 nt, synthetic construct; identical to SEQ ID NO: 26000
  source 1..54: mol_type = other RNA
  modified_base 12: mod_base = OTHER; note = 2'-O-methyl modified nucleotide
  modified_base 13: mod_base = OTHER; note = 2'-O-methyl modified nucleotide
  modified_base 14: mod_base = OTHER; note = 2'-O-methyl modified nucleotide
  modified_base 15: mod_base = OTHER; note = 2'-O-methyl modified nucleotide
  modified_base 16: mod_base = OTHER; note = 2'-O-methyl modified nucleotide
  modified_base 17: mod_base = OTHER; note = 2'-O-methyl modified nucleotide
  modified_base 18: mod_base = OTHER; note = 2'-O-methyl modified nucleotide
  modified_base 19: mod_base = OTHER; note = 2'-O-methyl modified nucleotide
  modified_base 20: mod_base = OTHER; note = 2'-O-methyl modified nucleotide
  modified_base 21: mod_base = OTHER; note = 2'-O-methyl modified nucleotide
  modified_base 46: mod_base = OTHER; note = 2'-O-methyl modified nucleotide

SEQ ID NO: 29838 - RNA, 54 nt, synthetic construct; identical to SEQ ID NO: 26000
  source 1..54: mol_type = other RNA
  modified_base 12: mod_base = OTHER; note = 2'-O-methyl modified nucleotide
  modified_base 13: mod_base = OTHER; note = 2'-O-methyl modified nucleotide
  modified_base 14: mod_base = OTHER; note = 2'-O-methyl modified nucleotide
  modified_base 15: mod_base = OTHER; note = 2'-O-methyl modified nucleotide
  modified_base 16: mod_base = OTHER; note = 2'-O-methyl modified nucleotide
  modified_base 17: mod_base = OTHER; note = 2'-O-methyl modified nucleotide
  modified_base 18: mod_base = OTHER; note = 2'-O-methyl modified nucleotide
  modified_base 19: mod_base = OTHER; note = 2'-O-methyl modified nucleotide
  modified_base 20: mod_base = OTHER; note = 2'-O-methyl modified nucleotide
  modified_base 21: mod_base = OTHER; note = 2'-O-methyl modified nucleotide
  modified_base 43: mod_base = OTHER; note = 2'-O-methyl modified nucleotide

SEQ ID NO: 29839 - RNA, 54 nt, synthetic construct; identical to SEQ ID NO: 26000
  source 1..54: mol_type = other RNA
  modified_base 12: mod_base = OTHER; note = 2'-O-methyl modified nucleotide
  modified_base 13: mod_base = OTHER; note = 2'-O-methyl modified nucleotide
  modified_base 14: mod_base = OTHER; note = 2'-O-methyl modified nucleotide
  modified_base 15: mod_base = OTHER; note = 2'-O-methyl modified nucleotide
  modified_base 16: mod_base = OTHER; note = 2'-O-methyl modified nucleotide
  modified_base 17: mod_base = OTHER; note = 2'-O-methyl modified nucleotide
  modified_base 18: mod_base = OTHER; note = 2'-O-methyl modified nucleotide
  modified_base 19: mod_base = OTHER; note = 2'-O-methyl modified nucleotide
  modified_base 20: mod_base = OTHER; note = 2'-O-methyl modified nucleotide
  modified_base 21: mod_base = OTHER; note = 2'-O-methyl modified nucleotide
  modified_base 47: mod_base = OTHER; note = 2'-O-methyl modified nucleotide

SEQ ID NO: 29840 - RNA, 54 nt, synthetic construct; identical to SEQ ID NO: 26000
  source 1..54: mol_type = other RNA
  modified_base 12: mod_base = OTHER; note = 2'-O-methyl modified nucleotide
  modified_base 13: mod_base = OTHER; note = 2'-O-methyl modified nucleotide
  modified_base 14: mod_base = OTHER; note = 2'-O-methyl modified nucleotide
  modified_base 15: mod_base = OTHER; note = 2'-O-methyl modified nucleotide
  modified_base 16: mod_base = OTHER; note = 2'-O-methyl modified nucleotide
  modified_base 17: mod_base = OTHER; note = 2'-O-methyl modified nucleotide
  modified_base 18: mod_base = OTHER; note = 2'-O-methyl modified nucleotide
  modified_base 19: mod_base = OTHER; note = 2'-O-methyl modified nucleotide
  modified_base 20: mod_base = OTHER; note = 2'-O-methyl modified nucleotide
  modified_base 21: mod_base = OTHER; note = 2'-O-methyl modified nucleotide
  modified_base 44: mod_base = OTHER; note = 2'-O-methyl modified nucleotide

SEQ ID NO: 29841 - RNA, 54 nt, synthetic construct; identical to SEQ ID NO: 26000
  source 1..54: mol_type = other RNA
  modified_base 12: mod_base = OTHER; note = 2'-O-methyl modified nucleotide
  modified_base 13: mod_base = OTHER; note = 2'-O-methyl modified nucleotide
  modified_base 14: mod_base = OTHER; note = 2'-O-methyl modified nucleotide
  modified_base 15: mod_base = OTHER; note = 2'-O-methyl modified nucleotide
  modified_base 16: mod_base = OTHER; note = 2'-O-methyl modified nucleotide
  modified_base 17: mod_base = OTHER; note = 2'-O-methyl modified nucleotide
  modified_base 18: mod_base = OTHER; note = 2'-O-methyl modified nucleotide
  modified_base 19: mod_base = OTHER; note = 2'-O-methyl modified nucleotide
  modified_base 20: mod_base = OTHER; note = 2'-O-methyl modified nucleotide
  modified_base 21: mod_base = OTHER; note = 2'-O-methyl modified nucleotide
  modified_base 49: mod_base = OTHER; note = 2'-O-methyl modified nucleotide

SEQ ID NO: 29842 - RNA, 54 nt, synthetic construct; identical to SEQ ID NO: 26000
  source 1..54: mol_type = other RNA
  modified_base 12: mod_base = OTHER; note = 2'-O-methyl modified nucleotide
  modified_base 13: mod_base = OTHER; note = 2'-O-methyl modified nucleotide
  modified_base 14: mod_base = OTHER; note = 2'-O-methyl modified nucleotide
  modified_base 15: mod_base = OTHER; note = 2'-O-methyl modified nucleotide
  modified_base 16: mod_base = OTHER; note = 2'-O-methyl modified nucleotide
  modified_base 17: mod_base = OTHER; note = 2'-O-methyl modified nucleotide
  modified_base 18: mod_base = OTHER; note = 2'-O-methyl modified nucleotide
  modified_base 19: mod_base = OTHER; note = 2'-O-methyl modified nucleotide
  modified_base 20: mod_base = OTHER; note = 2'-O-methyl modified nucleotide
  modified_base 21: mod_base = OTHER; note = 2'-O-methyl modified nucleotide
  modified_base 50: mod_base = OTHER; note = 2'-O-methyl modified nucleotide

SEQ ID NO: 29843 - RNA, 54 nt, synthetic construct; identical to SEQ ID NO: 26000
  source 1..54: mol_type = other RNA
  modified_base 12: mod_base = OTHER; note = 2'-O-methyl modified nucleotide
  modified_base 13: mod_base = OTHER; note = 2'-O-methyl modified nucleotide
  modified_base 14: mod_base = OTHER; note = 2'-O-methyl modified nucleotide
  modified_base 15: mod_base = OTHER; note = 2'-O-methyl modified nucleotide
  modified_base 16: mod_base = OTHER; note = 2'-O-methyl modified nucleotide
  modified_base 17: mod_base = OTHER; note = 2'-O-methyl modified nucleotide
  modified_base 18: mod_base = OTHER; note = 2'-O-methyl modified nucleotide
  modified_base 19: mod_base = OTHER; note = 2'-O-methyl modified nucleotide
  modified_base 20: mod_base = OTHER; note = 2'-O-methyl modified nucleotide
  modified_base 21: mod_base = OTHER; note = 2'-O-methyl modified nucleotide
  modified_base 51: mod_base = OTHER; note = 2'-O-methyl modified nucleotide

SEQ ID NO: 29844 - RNA, 62 nt, synthetic construct
  source 1..62: mol_type = other RNA
gtckttgtactctgggacttcggtcccagaagctacaamgataaggcttcatgccgaawtcm

SEQ ID NO: 29845 - RNA, 54 nt, synthetic construct; identical to SEQ ID NO: 26000
  source 1..54: mol_type = other RNA
  modified_base 4: mod_base = OTHER; note = 2'-O-methyl modified nucleotide
  modified_base 5: mod_base = OTHER; note = 2'-O-methyl modified nucleotide
  modified_base 6: mod_base = OTHER; note = 2'-O-methyl modified nucleotide
  modified_base 7: mod_base = OTHER; note = 2'-O-methyl modified nucleotide
  modified_base 8: mod_base = OTHER; note = 2'-O-methyl modified nucleotide
  modified_base 9: mod_base = OTHER; note = 2'-O-methyl modified nucleotide
  modified_base 10: mod_base = OTHER; note = 2'-O-methyl modified nucleotide
  modified_base 11: mod_base = OTHER; note = 2'-O-methyl modified nucleotide
  modified_base 12: mod_base = OTHER; note = 2'-O-methyl modified nucleotide
  modified_base 13: mod_base = OTHER; note = 2'-O-methyl modified nucleotide
  modified_base 14: mod_base = OTHER; note = 2'-O-methyl modified nucleotide
  modified_base 15: mod_base = OTHER; note = 2'-O-methyl modified nucleotide
  modified_base 16: mod_base = OTHER; note = 2'-O-methyl modified nucleotide
  modified_base 17: mod_base = OTHER; note = 2'-O-methyl modified nucleotide
  modified_base 18: mod_base = OTHER; note = 2'-O-methyl modified nucleotide
  modified_base 19: mod_base = OTHER; note = 2'-O-methyl modified nucleotide
  modified_base 20: mod_base = OTHER; note = 2'-O-methyl modified nucleotide
  modified_base 21: mod_base = OTHER; note = 2'-O-methyl modified nucleotide
  modified_base 22: mod_base = OTHER; note = 2'-O-methyl modified nucleotide
  modified_base 23: mod_base = OTHER; note = 2'-O-methyl modified nucleotide
  modified_base 24: mod_base = OTHER; note = 2'-O-methyl modified nucleotide
  modified_base 25: mod_base = OTHER; note = 2'-O-methyl modified nucleotide
  modified_base 26: mod_base = OTHER; note = 2'-O-methyl modified nucleotide
  modified_base 27: mod_base = OTHER; note = 2'-O-methyl modified nucleotide
  modified_base 28: mod_base = OTHER; note = 2'-O-methyl modified nucleotide
  modified_base 29: mod_base = OTHER; note = 2'-O-methyl modified nucleotide
  modified_base 30: mod_base = OTHER; note = 2'-O-methyl modified nucleotide
  modified_base 31: mod_base = OTHER; note = 2'-O-methyl modified nucleotide
  modified_base 32: mod_base = OTHER; note = 2'-O-methyl modified nucleotide
  modified_base 33: mod_base = OTHER; note = 2'-O-methyl modified nucleotide
  modified_base 34: mod_base = OTHER; note = 2'-O-methyl modified nucleotide
  modified_base 35: mod_base = OTHER; note = 2'-O-methyl modified nucleotide
  modified_base 36: mod_base = OTHER; note = 2'-O-methyl modified nucleotide
  modified_base 37: mod_base = OTHER; note = 2'-O-methyl modified nucleotide
  modified_base 38: mod_base = OTHER; note = 2'-O-methyl modified nucleotide
  modified_base 39: mod_base = OTHER; note = 2'-O-methyl modified nucleotide
  modified_base 40: mod_base = OTHER; note = 2'-O-methyl modified nucleotide
  modified_base 41: mod_base = OTHER; note = 2'-O-methyl modified nucleotide
  modified_base 42: mod_base = OTHER; note = 2'-O-methyl modified nucleotide
